(19) United States
(12) Patent Application Publication
(10) Pub. No.: US 2023/0019867 A1
(43) Pub. Date: Jan. 19, 2023

(54) PROGRAMMABLE SHELLS FOR VIRUS ENCAPSULATION

(71) Applicant: Technische Universität München, München (DE)

(72) Inventor: Hendrik Dietz, Haar (DE)

(21) Appl. No.: 17/904,711

(22) PCT Filed: Feb. 22, 2021
(86) PCT No.: PCT/EP2021/054307

§ 371 Date: Aug. 19, 2022

(30) Foreign Application Priority Data
Feb. 20, 2020 (EP) 20158577.5

(51) Int. Cl. A61K 47/69; A61P 31/12; A61K 47/68

(52) U.S. Cl. CPC A61K 47/6925; A61P 31/12; A61K 47/6807

(57) ABSTRACT

The present invention relates to a macromolecule-based nanostructure, such as a DNA-based nanostructure, for encapsulating a virus or viral particle, to a composition comprising a virus or viral particle encapsulated by such a macromolecule-based nanostructure according to the present invention, and to a method for encapsulating a virus or viral particle by using such a macromolecule-based nanostructure

### FIELD OF THE INVENTION

[0001] The present invention relates to a macromolecule-based nanostructure, such as a DNA-based nanostructure, for encapsulating a virus or viral particle, to a composition comprising a virus or viral particle encapsulated by such a macromolecule-based nanostructure according to the present invention, and to a method for encapsulating a virus or viral particle by using such a macromolecule-based nanostructure.

### BACKGROUND OF THE INVENTION

[0002] Viral infections cause millions of deaths per year globally, enormous suffering and morbidity, and impose huge drains on societies and economies in health care costs, lost work time, and other less easily measured burdens such as mental health issues associated with loss of parents, children, and care givers or stigmatization. Climate change and global migration are projected to increase the threat of viral outbreaks because vectors spread to regions that so far were too cold for them to survive. The burden of virus infections will further increase due to habitat encroachment by humans, urbanization and megacities with increasing population density, increasing travel not only locally but also far distance, and numerous other drivers of disease emergence (1). Viruses are the pathogen class most likely to adapt to new environmental conditions because of their short generation time and genetic variability allowing rapid evolution (2). For the majority of viral diseases (˜70% of current WHO-listed viruses), no effective treatment is available. The few existing antiviral therapies are almost exclusively targeted to a specific virus and do not allow application against a newly emerging pathogen. In addition, antiviral therapy typically faces the challenge that it must be started very soon after infection to be effective, before the viral load gets too high and caused disease symptoms. Emerging virus threats require a rapid response, but broadly applicable ready-to-use antivirals do not exist.

[0003] In this context, it is useful to first consider how current antiviral therapies work. Existing antiviral drugs target either virus-specific proteins, mostly polymerases, or essential virus or cellular structures that enable virus replication and spread. The major targetable steps in a virus replication cycle are (1) virus particles docking to the cell membrane of host cells; (2) uptake into the host cell; (3) release of the virus capsid into the cytoplasm and transport of the viral genome to the replication spot; (4) synthesis of viral nucleic acids and proteins and posttranslational processing of viral proteins; (5) assembly of virus components into new viral particles; (6) release of the newly formed viruses from the infected cell. Most clinically available antivirals are polymerase-inhibitors that are specific for a given viral enzyme. Examples include acyclovir (3), active against herpes simplex and varizella zoster virus; tenofovir, active against hepatitis B virus (HBV) and HIV and sofosbuvir, active against hepatitis C virus (HCV). Examples for drugs targeting different stages of the virus life cycle are: enfuvirtide (4), which inhibits HIV fusion (stage 2); amantadine (5), which inhibits influenza A virus uncoating (stage 3); or the neuraminidase inhibitor oseltamivir (6), which interferes with influenza virus release from host cells (stage 6) (6). These drugs, however, can only act when a virus is replicating or spreading but cannot kill or neutralize it. None of these antivirals is broadly applicable.

[0004] Recently, a star-shaped designer DNA nanostructure has been presented as a template to display multiple binding motifs with spatial pattern-recognition properties, which confers sensing and viral inhibitory capabilities for a dengue (DENV) viral surface (Kwon et al.; (56)). While it is stated that the molecular-platform design strategy could be adapted to detect and combat other disease-causing pathogens by generating the requisite ligand patterns on customized DNA nanoarchitectures, it is also stated that a defined DNA nanoarchitecture with precise, multivalent spatial pattern-recognizing properties is required, since without the optimal shape identity to keep the required hairpin interactions from forming, sensing and inhibitory abilities suffer. Thus, this proposal does not appear to provide a generically applicable approach for targeting different or yet uncharacterized virus particles, such as needed in case of the emergence of a new virus, as seen in these days with the Coronavirus. Additionally, the rather open structure of the nanostructures bears the danger that viral capsid proteins may still be able to protrude, to be immunologically active and/or to trigger the viral infection process.

[0005] A number of additional oligonucleotide-based nanostructures that contain certain cavities have been developed in the past. CN 110 272 980 describes a core shell structure made from DNA monomers having a trigeminal structure, wherein the generated spherical shaped structure is used for detecting miRNA molecules. US 2018/016569 describes a DNA based nanostructure comprising a cavity, a so called nano cage. WO 2017/049136 describes a cylindrical nucleic acid nano structure, having spherical shape with a cavity comprising a binding sequence for nucleic acids or peptides. WO 2013/148186 describes a wholly nucleic acid core nanostructure with a lipid coating which is used for encapsulating a therapeutic agent. WO 2017/189870 describes nucleic acid nano-structures having different geometrical shapes. Li et al. (57) describe spherical nano structures of DNA. In all these cases, the cavities comprised in these structures are way too small to enable the successful encapsulation of full viruses and/or the structures are too open so that surface proteins of the viruses may still be able to interact with the host's target cell structures.

[0006] The past couple of weeks have shown that the genomes of viruses, such as those of Covid-19 frequently present mutations, which may lead to a diminished, or even potentially abolished, success of treatment options, such as vaccinations. Thus, there is a great need for therapeutic interventions that permit the fast adaptation to new emerging developments with respect to, for example, the infectivity of a given virus. None of the approaches mentioned above are modular and flexible enough to enable a fast adaptation of the structures to mutational changes of the viruses.

[0007] Thus, while different strategies for the treatment of viral infections have been developed or suggested up to date, there is still a need for the development of a concept of a generic antiviral drug platform for targeting a variety of viral pathogens. In particular, a concept would be highly desirous that does not rely on prior detailed knowledge about genetics and properties of the target virus.

### SUMMARY OF THE INVENTION

[0008] It is an object of the present invention to provide constructs that enable the encapsulation of a virus or viral particle. The solution to that problem, i.e. the use of macromolecular building blocks, such as DNA-based nanostructures, has not yet been taught or suggested by the prior art.

[0009] Therefore, in one aspect, the disclosure provides a macromolecule-based nanostructure encasing a cavity with a diameter of at least 20 nm for encapsulating a virus or viral particle.

[0010] In a particular embodiment, the disclosure provides a macromolecule-based nanostructure, which is a DNA-based nanostructure.

[0011] In another aspect, the disclosure provides a composition comprising a virus or viral particle encapsulated by a macromolecule-based nanostructure according to the present invention.

[0012] In yet another aspect, the disclosure provides a method for encapsulating a virus or viral particle, comprising the steps of: providing a macromolecule-based nanostructure according to the present invention, and contacting said macromolecule-based nanostructure with a medium comprising, or suspected to comprise, said virus or viral particle.

[0013] The disclosure contemplates all combinations of any one or more of the foregoing aspects and/or embodiments, as well as combinations with any one or more of the embodiments set forth in the detailed description and examples.

[0014] Other features, objects, and advantages of the compositions and methods herein will be apparent from the description and drawings, and from the claims.

### BRIEF DESCRIPTION OF THE DRAWINGS

[0015] FIG. 1 shows the design principles. (A) Triangulation number of icosahedral shells. Each colored triangle represents one of the 20 faces forming an icosahedron.

[0016] The small triangles represent the triangular building blocks. (h,k) indicates the location of pentamers within a shell. (Aa) Icosahedral shell encapsulating a virus capsid. (B) Natural icosahedral virus shells. Left, T=1 shell built out of identical subunits (MVM) (22). Right, T=3 shell built out of multiple copies of three different subunits (CCMV) (23). (C) ENRG-MD simulation (38) of an exemplary shell subunit design prototype at the start (left) and end (right) of the simulation. (D and E) Cylindrical model of DNA-origami triangles and the corresponding shells. The sides of the triangles are modified with protrusions (light) and recesses (dark). The arrows indicate shape-complementary sides. For each shell design, one of its 20 icosahedral faces has been displaced (see (A)). a is the bevel angle of the sides, #the number of DNA-origami triangles building the shell (design details see FIGS. 36 to 39).

[0017] FIG. 2 shows the structures of shells and of shell subunits. (A) Cryo-EM micrographs of assembled shells in free-standing ice (0, T=1) and on lacey carbon grids with carbon support (T=3, T=4). (B to E) Cryo-EM reconstructions of shell subunits and fully assembled shells (octahedron to T=4 shells). The two-dimensional class averages show assembled shells from different orientations. (F) EM validation of the T=9 shell design. Top left, cryo-EM reconstructions of the three triangles assembling into a T=9 shell. Top right, negatively stained EM micrograph of assembled shells. Bottom, comparison of slices through a model shell to slices of a tomogram calculated from an EM tilt series. The arrows indicate the positions of pentamers within the shell.

[0018] FIG. 3 shows shell yield and stability. (A) Laser-scanned fluorescent images of 0.5% agarose gels showing the assembly of octahedra, T=1, T=3 and T=4 shells at 40° C. with a monomer concentration of 5 nM at different time points. Solid lines give cross-sectional lane intensity profiles from the 1 d samples. (B) Triangle exchange experiments. Cyan: FRET-pair labeled T=1 shells. Orange: unlabeled shells. Symbols give FRET signals measured vs time of incubation in the presence of the indicated concentrations of Mg²⁺. Errors bars are SEM of duplicate measurements (design details see FIG. 44). (C) Left: schematics of covalent stabilization of shells using CNVK moieties placed at base-pair stacking sites. Right: Laser-scanned fluorescent image of 0.5% agarose gel on which shell samples were run under shell-destabilizing conditions (low salt, 5 mM Mg²⁺). From left to right: Marker lane, non-illuminated T=1 shell (disassembles), sample illuminated for 30 min with 365 nm light (stays intact), 365-illuminated sample additionally illuminated with 310 nm light for 1 min to reverse the covalent bonding (disassembles). S=subunits. C=Complete shells. P=pocket. (D) Negative-staining TEM image of octahedral shells coated with a 1:1 mixture of oligolysine and oligolysine-PEG and incubated for 1 h and 24 h in 55% mouse serum at 37° C.

[0019] FIG. 4 shows the programming of partial shell assembly and trapping of a viral capsid (here: hepatitis B virus core particles (HBV). (A-C) Cylindrical models of DNA origami triangles and corresponding partial shells. The sides of the triangles are modified with protrusions and recesses. The arrows indicate shape-complementary sides. White crosses indicate deactivated interaction sites. (D-F) Cryo-EM 3D reconstructions of half-octahedral (D), half T=1 shells (E) and T=1 shells omitting a pentagon vertex (F). Arrows indicate density stemming from anchor sites for mounting virus-binding moieties. (G) Cryo-EM reconstruction of a HBV core particle (Electron Microscopy Data Bank identifier EMD-0271). (H) Left: Cut through the octahedral-DNA shell cryo EM map with the HBV core particle trapped. The density around the HBV core particle is attributed to the layer of antibodies connecting the HBV core particles to the octahedral shell. Right: Cryo-EM reconstruction of two octahedral half-shells coordinating a trapped hepatitis-B virus particle. (I) Left: Cut through the map similar as in (H). The electron density thresholds differ, which makes the HBV core particle look thicker in the T=1 half shell compared to when trapped in the half octahedron. Right: Cryo-EM reconstruction of half T=1 shell engulfing a HBV core particle. (J) Negative stain TEM images of T=1 shell with a missing pentagon vertex engulfing up to three HBV core particles. (K) In vitro virus blocking ELISA experiments of 2.5 pM HBV core particle incubated with pre-assembled mixtures of 1 nM oligonucleotide-conjugated capture antibody and various concentrations of half T=1 shells. Errors bars are standard deviation of triplicate measurements.

[0020] FIG. 5 shows design principle of triangular subunits. (A) Schematics of T=1 triangle designs with a bevel angle alpha. (B) Cross-section of a triangles side consisting of 4×6 helices in square-lattice packing without (left) and with (right) a bevel angle. The side is turned around the longest helix indicated by ‘0’. d is the distance between the center of two neighboring helices (2.6 nm) and x the radial distance of any helix to helix ‘0’. To transform nm in base pairs we used a rise of 0.34 nm per base pair. (C and D) Schematic illustrating the calculation of helix lengths. Left, cylindrical model of a triangle. Middle, schematics of the lengths a(x) and b(x) of different helices within the triangle depending on the distance x to helix ‘0’. Right, formulas to calculate the length differences of individual helices. (E) Scaffold routing through the triangular structure. Left, The scaffold forms a loop around the whole triangle before connecting to the next layer. Right, each corner is built by a certain scaffold domain (different blues) and is only connected by one cross-over to a neighboring corner (red). (F) 1.5% agarose gel containing 0.5xTBE buffer and 5.5 mM MgCl₂ showing initial folding screens according to (46). (G) Integrated lane profiles of the two lanes indicated by the dotted squares in (B). T=1ₗₒₒₚ forms a lot of aggregates and less well formed triangles. Changing the scaffold routing to T=1_{corner} clearly improves the folding yield. Subsequently, all triangles presented in this work are designed with the improved scaffold routing of T=1_{corner}. A: malformed aggregates, M: correctly folded monomers. (H)+(I) Cylindrical model of the T=1 triangle with an exemplary routing of the scaffold strand for the first four helices. (H) The scaffold forms a loop around the whole triangle before connecting to the next helix. (I) Each corner is built by a certain scaffold domain (different blues) and is only connected by one cross-over (red) to a neighboring corner.

[0021] FIG. 6 shows cryo-EM reconstruction of the octahedron triangle. (A) Cryo-EM micrograph of the octahedron triangle in free-standing ice. (B) Two dimensional class averages showing different orientations. (C) Graph showing different FSC curves which were used for resolution estimation. (D) Electron density map shown from different viewing angles.

[0022] FIG. 7 shows cryo-EM reconstruction of the T=1 triangle. (A) Cryo-EM micrograph of the T=1 triangle in free-standing ice. (B) Two dimensional class averages showing different orientations. (C) Graph showing different FSC curves which were used for resolution estimation. (D) Electron density map shown from different viewing angles.

[0023] FIG. 8 shows cryo-EM reconstruction of the T=3 triangle. (A) Cryo-EM micrograph of the T=3 triangle in free-standing ice. (B) Two dimensional class averages showing different orientations. (C) Graph showing different FSC curves which were used for resolution estimation. (D) Electron density map shown from different viewing angles.

[0024] FIG. 9 shows cryo-EM reconstruction of the T=4 triangle T_{equi}. (A) Cryo-EM micrograph of the T_{equi} triangle in free-standing ice. (B) Two dimensional class averages showing different orientations. (C) Graph showing different FSC curves which were used for resolution estimation. (D) Electron density map shown from different viewing angles.

[0025] FIG. 10 shows Cryo-EM reconstruction of the T=4 triangle Tᵢₛₒ. (A) Cryo-EM micrograph of the Tᵢₛₒ triangle in free-standing ice. (B) Two dimensional class averages showing different orientations. (C) Graph showing different FSC curves which were used for resolution estimation. (D) Electron density map shown from different viewing angles.

[0026] FIG. 11 shows Cryo-EM reconstruction of the T=9 triangle Tₚₑₙₜ. (A) Cryo-EM micrograph of the Tₚₑₙₜ triangle in free-standing ice. (B) Two dimensional class averages showing different orientations. (C) Graph showing different FSC curves which were used for resolution estimation. (D) Electron density map shown from different viewing angles.

[0027] FIG. 12 shows Cryo-EM reconstruction of the T=9 triangle Tₕₑₓ₁. (A) Cryo-EM micrograph of the Tₕₑₓ₁ triangle in free-standing ice. (B) Two dimensional class averages showing different orientations. (C) Graph showing different FSC curves which were used for resolution estimation. (D) Electron density map shown from different viewing angles.

[0028] FIG. 13 shows Cryo-EM reconstruction of the T=9 triangle Tₕₑₓ₂. (A) Cryo-EM micrograph of the Tₕₑₓ₂ triangle in free-standing ice. (B) Two dimensional class averages showing different orientations. (C) Graph showing different FSC curves which were used for resolution estimation. (D) Electron density map shown from different viewing angles.

[0029] FIG. 14 shows Correction for folding defects in Tₕₑₓ₁ (A) Design diagram of the Tₕₑₓ₁ triangle with fixed corner. (B) Zoom-in on the location of the corrupted corner showing the differences between the two versions in the design diagram. (C and D) Cryo-EM map of the two Tₕₑₓ₁ triangle versions. The arrows indicate the location of the corrupted corner. (E) 1.5% agarose gels with different MgCl₂ concentrations showing the dimerization of Tₚₑₙₜ and Tₕₑₓ₁ triangles. All sides not involved in the binding of the two triangles were passivated with polyT extensions at the stacking contacts. While the corrupted corner prevents the two triangles to bind to each other because of missing stacking contacts, the triangle with fixed corners binds to Tₚₑₙₜ and assembles into dimers. Lane 1: Tₚₑₙₜ+Tₕₑₓ₁ (corrupted corner), Lane 2: Tₚₑₙₜ+Tₕₑₓ₁ (fixed corner). D: dimer, M: monomer.

[0030] FIG. 15 shows Cryo-EM reconstruction of the assembled octahedron at 17.5 mM MgCl₂. (A) Cryo-EM micrograph of the octahedron in free-standing ice at 17.5 mM MgCl₂. (B) Two dimensional class averages showing different orientations. (C) Graph showing different FSC curves which were used for resolution estimation. (D) Classes after 3d classification in relion3. (E) Refinement without using any symmetry (C1). (F) Electron density map shown from the 4-fold, 3-fold and 2-fold symmetry axis (left to right).

[0031] FIG. 16 shows Cryo-EM reconstruction of the T=1 shell at 20 mM MgCl₂. (A) Cryo-EM micrograph of the T=1 shell in free-standing ice. (B) Two dimensional class averages showing different orientations. (C) Graph showing different FSC curves which were used for resolution estimation. (D) Classes after 3d classification in relion3. (E) Refinement without using any symmetry (C1). (F) Electron density map shown from the 5-fold, 3-fold and 2-fold symmetry axis (left to right).

[0032] FIG. 17 shows Cryo-EM reconstruction of the T=1 shell at 25 mM MgCl₂. (A) Cryo-EM micrograph of T=1 shells on a lacey carbon grid with carbon support. (B) Two dimensional class averages showing different orientations. (C) Graph showing different FSC curves which were used for resolution estimation. (D) Electron density map shown from the 5-fold, 3-fold and 2-fold symmetry axis (left to right, respectively).

[0033] FIG. 18 shows Cryo-EM reconstruction of the T=3 shell at 20 mM MgCl₂. (A) Cryo-EM micrograph of T=3 shells on a lacey carbon grid with carbon support. (B) Two dimensional class averages showing different orientations. (C) Graph showing different FSC curves which were used for resolution estimation. (D) Electron density map shown from the 5-fold, 3-fold and 2-fold symmetry axis (left to right).

[0034] FIG. 19 shows cryo-EM reconstruction of the T=4 shell at 25 mM MgCl₂. (A) Cryo-EM micrograph of T=4 shells on a lacey carbon grid with carbon support. (B) Two dimensional class averages showing different orientations. (C) Graph showing different FSC curves which were used for resolution estimation. (D) Electron density map shown from the 5-fold, 3-fold and 2-fold symmetry axis (left to right).

[0035] FIG. 20 shows negative stain EM tomograms of the T=1 triangle with −5° bevel angle. (A) Top left: Schematics of T=1 triangle designs with a modified bevel angle by 5° in both directions (original bevel angle 20.9°). Top right: Laser-scanned image of an agarose gel on which shell assembly reactions of all three design variants were electrophoresed. Bottom: exemplary negative-staining TEM micrographs and two-dimensional class averages of shell assembly products. (B) Negative stain TEM image of assembled T=1 triangles with a decreased bevel angle by −5° assembled at 35 mM MgCl₂. The dotted squares indicate the assemblies whose tomograms are shown in (C) and (D). (C) Four slices of a tomogram of an assembled T=1 shell. The white arrows indicate locations of stress release that accumulates because of the wrong bevel angle. (D) Four slices of a tomogram of a not fully closed assembly.

[0036] FIG. 21 shows TEM and HIM data of T=1, T=3 and T=9 shells. (A) 0.5% agarose gels containing 0.5x TBE buffer and 20 mM MgCl₂. The gels ran for 1.5 h at 90 V bias voltage. The buffer was exchanged after 45 min. While the octahedron triangles assemble at all tested MgCl₂ concentrations into shells during the triangle folding reaction, the T=1 triangles only assemble at 20 mM MgCl₂ or higher into closed shells. There are staple strands in solution because the triangles are folded with a four times excess of staple over scaffold strands and not purified before loading them to the agarose gel. The folding reaction mixtures contained different amounts of MgCl₂ (15-30 mM) and were subjected to a thermal annealing ramp from 60° C. to 45° C. decreasing the temperature by 1° C. per hour. sc: scaffold reference, pas: passivated triangle, 15-30: MgCl₂ concentration in mM present in the folding reaction, P: pocket, C: shell, M: monomer, S: excess staples. (B) Negative stain TEM images of octahedra and T=1 shells assembled during the folding reaction of the triangles at 20 and 25 mM MgCl₂, respectively. Single stranded excess staple strands are still visible. (C) Negative stain TEM image of assembled T=1 triangles assembled at 25 mM MgCl₂. (D) HIM images of T=3 shells coated with a 5 nm layer of AuPd. (E) Negative stain TEM images of assembled T=9 shells. Top: exemplary images of fully or partially assembled shells. The white arrows indicate the right locations of pentamers within the assembly. Bottom: Four slices of a tomogram showing three fully assembled T=9 shells.

[0037] FIG. 22 shows exemplary procedure for extracting complete shell yield from agarose gels (done with Igor Pro 7). We extracted the lane profiles of the lanes containing the sample (orange) as well as of an empty lane (blue) to get the background signal. Subsequently, we subtracted the background, normalized the graph and fitted a Gaussian to the shell peak. The area underneath the Gaussian curve is the completed shell yield.

[0038] FIG. 23 shows subunit exchange experiments. Agarose gels used for extracting the FRET ratio of the subunit exchange experiments. The gels were run at 25 mM (A), 22.5 mM (B) and 20 mM MgCl₂ (C). All gels are 0.5% agarose gels containing 0.5x TBE buffer with different MgCl₂ concentrations and ran for 1.5 h at 90 V bias voltage. The buffer was exchanged after 45 min. The same gel was scanned in a Cy3 (left) and FRET (right) channel. Triangles with Cy3 and Cy5 labeled oligonucleotides at appropriate locations (see FIG. 43) and unlabeled triangles were assembled separately at 25 mM MgCl₂ before mixing the assembled shells and adjusting the MgCl₂ concentration. The mixtures were incubated up to 14 days at 40° C. At indicated time points aliquots were taken, frozen in liquid nitrogen and stored at −20° C. As reference for fully exchanged subunits, labeled and unlabeled triangles were assembled in a 1:1 ratio at 25 mM MgCl₂ (mixed).

[0039] FIG. 24 shows design principle of triangular subunits for half shells. Cylindrical model of DNA-origami triangles assembling into half octahedra (A+D), half T=1 shells (B+E) or a T=1 shells with a missing pentagonal vertex (C+F). The sides of the triangles are modified with protrusions (light) and recesses (dark). The arrows indicate shape-complementary sides. Depending on the activation of certain sided the triangles form different kind of assemblies. All sides not involved in the binding of the triangles were passivated with polyT extensions at the stacking contacts.

[0040] FIG. 25 shows cryo-EM reconstruction of the half Octahedron shell. (A) Cryo-EM micrograph of the half Octahedron shell in free-standing ice. (B) Two dimensional class averages showing different orientations. (C) Graph showing different FSC curves which were used for resolution estimation. (D) Classes after 3d classification in relion3. (E) Refinement without using any symmetry (C1). (F) Electron density map of the half Octahedron shell reconstructed with C4 symmetry.

[0041] FIG. 26 shows cryo-EM reconstruction of the half T=1 shell. (A) Cryo-EM micrograph of the half T=1 shell in free-standing ice. (B) Two dimensional class averages showing different orientations. (C) Classes after 3d classification in relion3. (D) Refinement without using any symmetry (C1). (E) Refinement with using C5 symmetry. (F) Multibody refinement using six bodies indicated by the colors in relion3.

[0042] FIG. 27 shows cryo-EM reconstruction of the T=1 shell with a missing pentagon vertex. (A) Cryo-EM micrograph of T=1 shell with a missing pentagon vertex in free-standing ice. (B) Two dimensional class averages showing different orientations. (C) Graph showing different FSC curves which were used for resolution estimation. (D) Classes after 3d classification in relion3. (E) Refinement without using any symmetry (C1). (F) Electron density map of the T=1 shell missing one pentagon vertex reconstructed with C5 symmetry.

[0043] FIG. 28 shows negative stain EM images of encapsulated HBV core particles using a half octahedron (A), a half T=1 shell (B) and a T=1 shell with a missing pentagonal vertex (C). All shells were assembled at 30 mM MgCl₂, incubated with the DNA modified 17H7 antibody overnight and subsequently incubated with the HBV particles for 1-4h or overnight.

[0044] FIG. 29 shows negative control of HBV binding. (A) Negative stain images of HBV core particles and half T=1 shells without the presence of 17H7 antibodies. (B) Negative stain images of half T=1 shells equipped with 4D06 HBsAg antibodies and HBV core particles.

[0045] FIG. 30 shows cryo-EM reconstruction of the half Octahedron shell with a trapped HBV core particle. (A) Cryo-EM micrograph of the half Octahedron shell with HBV core particles in free-standing ice. (B) Two dimensional class averages showing different orientations. (C) Classes after 3d classification in relion3. One half of class1 and class2 is not well defined because of the averaging of multiple conformation of the second half shell. (D) Multibody refinement with three bodies (the two half shells and the HBV core particle) using the particles in class3 and class4 in (C). (E) First eigenvector of the multibody refinement showing a rotational movement of the second half shell. (F) Second eigenvector of the multibody refinement showing a sliding movement of the second half shell.

[0046] FIG. 31 shows cryo-EM reconstruction of the half T=1 shell with a trapped HBV core particle. (A) Cryo-EM micrograph of the half T=1 shell with a trapped HBV core particle in free-standing ice. (B) Two dimensional class averages showing different orientations. (C) Graph showing different FSC curves which were used for resolution estimation. (D) Classes after 3d classification in relion3. (E) Refinement without (left) and with (right) using C5 symmetry.

[0047] FIG. 32 shows in vitro virus blocking ELISA. (A) Schematics of the in vitro blocking ELISA. The HBV core particle by itself can bind to the immobilized CAgHB antibodies and can be visualized by a subsequent flushing of an anti-CAgHB conjugated with a horseradish peroxidase (HRP). When the HBV core particle is engulfed by a half T=1 particle, the shell sterically occludes the core particle from binding to the surface and the signal of the HRP is reduced. (B) In vitro virus blocking ELISA experiments of 2.5 pM HBV core particle incubated with pre-assembled mixtures of 1 nM oligonucleotide-conjugated capture antibody and various concentrations of half T=1 shells. Errors bars are standard deviation of triplicate measurements. (C) Negative stain TEM images of selected samples from the in vitro blocking ELISA indicated by numbers in (B). The half T=1 shell concentration were: (1) 3.1 pM, (2) 12.5 pM, (3) 50 pM, (4) 100 pM.

[0048] FIG. 33 shows design strategy T=1 triangle and a triangular brick structure. (A) Schematic representation of T=1 triangle dimerization (shown in orange) with the protruding brick (shown in blue) in top and side view. Each cylinder represents a double stranded DNA helix. The cylinders colored in red inside the triangle and in dark blue inside the tail mark those helices connecting the two objects. The thin lines between the two structures indicate single stranded DNA sticky ends extending from the triangle to the brick-like structure. (B) Field of view of a negative stain TEM image of the dimerized structures (left) and 2D class averages of the dimer in top and side view (right).

[0049] FIG. 34 shows cryo-EM reconstruction of the triangular brick. (A) Cryo-EM micrograph of the triangular brick in free-standing ice at 5 mM MgCl₂. (B) Two dimensional class averages showing different orientations. (C) Graph showing different FSC curves which were used for resolution estimation. (D) Electron density map shown from different viewing angles.

[0050] FIG. 35 shows cryo-EM reconstruction of the spiky shell at 22.5 mM MgCl₂. (A) Cryo-EM micrograph of the spiky shell in free-standing ice at 22.5 mM MgCl₂. (B) Two dimensional class averages showing different orientations. (C) Graph showing different FSC curves which were used for resolution estimation. (D) Electron density map shown from the 5-fold, 2-fold and 3-fold symmetry axis (left to right, respectively). (E) Cut through the density map shown in (D).

[0051] FIG. 36 shows design diagram of Octa and T=1 triangles prepared with caDNAno v0.1. Oligonucleotides that connect two different sides have five additional single-stranded thymidines at the corner.

[0052] In this context, it should be noted that with respect to FIGS. 36 to 43 and 51, these figures show schematic views of the complex arrangement of the different oligonucleotides forming the nanostructures. All oligonucleotides used in forming these nanostructures as shown in FIGS. 36 to 43 and 51 are listed in Table 1 and are included in the Sequence Listing. Thus, Table 1 contains all sequence information needed in order to generate the nanostructures schematically shown in FIGS. 36 to 43 and 51, which are included for illustration purposes only. No additional sequence information is included in those figures.

[0053] FIG. 37 shows design diagram of T=1 triangles with altered bevel angle and T=3 triangle prepared with caDNAno v0.1. Oligonucleotides that connect two different sides have five additional single-stranded thymidines at the corner.

[0054] FIG. 38 shows design diagram of T=4 triangles and Tₚₑₙₜ prepared with caDNAno v0.1. Oligonucleotides that connect two different sides have five additional single-stranded thymidines at the corner.

[0055] FIG. 39 shows design diagram of T=9 triangles Tₕₑₓ₁ and Tₕₑₓ₂ prepared with caDNAno v0.1. Oligonucleotides that connect two different sides have five additional single-stranded thymidines at the corner.

[0056] FIG. 40 shows design diagram of half-shell T=1 triangles prepared with caDNAno v0.1. (A)+(B) The Tₚₑₙₜ triangle can be used to assemble half T=1 shells together with the T_{ring} triangle or to assemble T=1 shells missing a pentagon vertex together with T_{ring1} and T_{ring2} triangles (FIG. 42). Oligonucleotides that connect two different sides have five additional single-stranded thymidines at the corner. Every side is equipped with three handles for attaching the antibodies (seq.: GCAGTAGAGTAGGTAGAGATTAGGCA-oligonucleotide). (C)+(D) Zoom on the recess and protrusion of the Tₚₑₙₜ and T_{ring} triangle in (A) and (B). Six oligos building the recess were modified with overhangs complementary to parts of the scaffold in the protrusion to increase the binding strength.

[0057] FIG. 41 shows design diagram of Octa and T=1 half-shell triangles prepared with caDNAno v0.1. Oligonucleotides that connect two different sides have five additional single-stranded thymidines at the corner. Every side is equipped with three handles for attaching the antibodies (seq.: GCAGTAGAGTAGGTAGAGATTAGGCA-oligo). The T_{ring1} and T_{ring2} triangles can assemble T=1 shells missing a pentagon vertex together with Tₚₑₙₜ triangle (FIG. 40).

[0058] FIG. 42 shows design diagrams for modified T=1 shells prepared with caDNAno v0.1. (A) T=1 triangle with protruding oligonucleotides. (B) Triangular brick structure with connections sites. (C) Single-stranded scaffold with 20 handles for triangle (grey) and one handle for Cy5 (red) attachment.

[0059] FIG. 43 shows a design diagram for a T=1 triangle with modifications prepared with caDNAno v0.1. T=1 triangle with Cy3 (green star) and Cy5 (red star) modifications on the 5′ end.

[0060] FIG. 44 shows the sculpting on an icosahedral canvas. (a-e) Triangular net projection and schematics of different partial shells: half octahedral shell (a), pentamer (b), half T=1 shell (c), ring (d) and T=1 shells lacking a pentagon vertex (e). (i-k) Cryo-EM 3D reconstructions of the partial shells sown in FIG. 4(A-C). Insets give typical two-dimensional class averages showing assembled shells from different orientations.

[0061] FIG. 45 shows the trapping of hepatitis B virus (HBV) core particles. (a) Negative stain TEM images of HBV core particles trapped in half octahedral shells. Inset: schematic representation of two half octahedral shells (grey) equipped with antibodies (cyan) with a trapped HBV core particle (red). (b) Negative stain TEM images of HBV core particles trapped in half T=1 shells. Inset: same as in (A) with a half T=1 shell. (c) Negative stain TEM image of T=1 triangles modified with nine antibodies self-assembled around HBV core particles as templates. Inset: same as in (A) with single triangles. (d) Left: Two-dimensional EM class averages. Middle: Cryo-EM reconstruction of two octahedral half-shells coordinating a trapped hepatitis-B virus particle. Right: Cut through the octahedral-DNA shell cryo EM map with the HBV core particle trapped. The density around the HBV core particle stems from the antibodies connecting the HBV core particles to the octahedral shell. Red arrows: HBV core particle. Cyan arrows: antibodies connecting the shell to the HBV core particle. (e) Same as in (d) for the half T=1 shell. The electron density thresholds differ, which makes the HBV core particle look thicker in the T=1 half shell compared to the half octahedron (right). (f) Negative stain TEM images of T=1 shell with a missing pentagon vertex engulfing up to three HBV core particles. (g) In vitro virus blocking ELISA experiments. Top: Schematic representation of the ELISA experiment. Bottom: All experiments are done at a ratio of antibody (Ab) to HBV of 400:1. The half-shells have 90 antibody binding sites. Solid filled dots indicate 2.5 pM HBV core particles incubated with pre-assembled mixtures of 1 nM oligonucleotide-conjugated capture antibody and various concentrations of half T=1 shells. Inset (i) illustrates low half-shell concentration for which antibodies saturate the half-shell binding sites and excess antibodies are in solution. Inset (ii) illustrates the case when the antibody concentration is equal to the concentration of binding sites on the half-shell; the half-shell is saturated with antibody with little antibody remaining in solution. Inset (iii) illustrates the case where on average 4 antibodies are bound per half-shell. Two controls were performed at the same stochiometric ratio of 400:1 Ab:HBV to quantify virus blocking efficiency as a function of half-shell concentration. The open dot represents a mixture of HBV core particles, antibodies and unfunctionalized T=1 half-shells. The open square represents HBV plus antibody without half-shells. The green dot shows a blocking efficiency of about 80% at only a 5:1 ratio of Ab:half-shells. Error bars are standard deviation of triplicate measurements.

[0062] FIG. 46 shows the neutralization of AAV2 with DNA-origami half shells. (a) Schematic illustrating that successful infection of HEK293T cells with AAV2 results in the expression of eGFP, while cells exposed to AAV2 captured in DNA half shells do not express eGFP. Yellow circles=AAV2, blue Y=anti-AAV2 IgG antibody, grey angled blocks: DNA half shells. (b) TEM images demonstrating capture of AAV2 virus particles within the DNA-origami half shells. Capture was successful in the presence of serum and BSA. Debris from serum can be seen in the TEM images. (c) Quantification of infected cells by flow cytometry for the conditions: AAV2 only, anti-AAV2 applied at IC50 concentration (1 nM), and DNA-origami half shells with anti-AAV2 conjugated to the inside. Anti-AAV2 and DNA half shells were preincubated with AAV2, respectively. The half shells were used at an overall identical antibody concentration as the anti-AAV2 only condition, with ˜36 antibodies per shell, and ˜7 half shells per virus particle. Data was quantified using flow cytometry, and is presented as mean±s.d., n=3 biologically independent experiments. One-way ANOVA was performed to test significant inhibition compared the control, both anti-AAV2 alone and half shell origami+anti-AAV2 demonstrated significant neutralization compared to the AAV2 only control (p≤0.0001). Conjugation of anti-AAV2 to DNA-origami half shells results in significantly greater neutralization capacity than free anti-AAV2 (p≤0.001). (d) Representative epifluorescent microscopy images demonstrating the expression of eGFP by infected cells. For each of the conditions, eGFP expression (green), cell nuclei (blue) and the overlay are given. Scale bars represent 100 μm.

[0063] FIG. 47 shows One-pot assembly during the triangle folding reaction of octahedral and T=1 shells. (A) 0.5% agarose gels containing 0.5x TBE buffer and 20 mM MgCl₂. The gels,ran for 1.5 h at 90 V bias voltage. The buffer was exchanged after 45 min. While the octahedron triangles assemble at all tested MgCl₂ concentrations into shells during the triangle folding reaction, the T=1 triangles only assemble at 20 mM MgCl₂ or higher into closed shells. There are staple strands in solution because the triangles are folded with four times excess of staple over scaffold strands and not purified before loading them to the agarose gel. The folding reaction mixtures contained different amounts of MgCl₂ (15-30 mM) and were subjected to a thermal annealing ramp from 60° C. to 45° C. decreasing the temperature by 1° C. per hour. sc: scaffold reference, pas: passivated triangle, 15-30: MgCl₂ concentration in mM present in the folding reaction, P: pocket, C: shell, M: monomer, S: excess staples. (B) Negative stain TEM images of octahedra and T=1 shells assembled during the folding reaction of the triangles at 20 and 25 mM MgCl₂, respectively. Single stranded excess staple strands are still visible. (C) Negative stain TEM images of T=1 shells assembled from PEG purified triangles at 20 mM MgCl₂ for 2 days at 40° C. Instead of using gel purification to purify the DNA-origami triangles, PEG purification was used as previously described (1).

[0064] FIG. 48 shows Negative stain TEM images of Tring1 and Tring2. (A) Cylindrical model of the DNA-origami ring containing 10 triangles. (B) Negative stain images of rings formed by T_{ring1} and T_{ring2} assembled for 1d at 40° C. (ctriangle=10 nM, cMgCl₂=25 mM). The white numbers show the number of triangles within a ring. (C) Exemplary particles showing rings with 8, 10 or 12 triangles as well as not fully closed rings.

[0065] FIG. 49 Dose-response characterization of neutralization capacity and cell viability. Complete IC50 curves for both free antibody (anti-AAV2, A) and origami half shells+anti-AAV2 (B). Concentration of half shells+anti-AAV2 in (B) is normalized to the concentration of anti-AAV2. Origami buffer only and half shell only conditions do not contain anti-AAV2, but the respective data points are positioned for easy visualization. Concentration of the half shells only is identical to that used in the highest half shell+anti-AAV2 condition. Below each graph is the approximate number of anti-AAV2 antibodies, and number of half shells, per AAV2 virus particle. All ratios are based on the total number of virus particles. (C) Fold-increase in neutralization capacity that is achieved by conjugation of the anti-AAV2 antibody to the origami half shells, for each of the concentrations in the IC50 curves (A and B), denoted as C1- C8. (D) Representative epifluorescent images demonstrating expression of eGFP by infected cells for origami half shells without conjugated anti-AAV2. Scale bars represent 100 μm. (E) Viability of HEK293T cells exposed to half shell origami structures for 24 h and 48 h. Half shell concentrations are identical to those used in the IC50 characterization (B). Exposure of HEK293T cells to the DNA origami half shells did not result in dose-dependent toxicity. Data is presented as mean±s.d., n=3 biologically independent experiments.

[0066] FIG. 50 Encapsulation of circular ssDNA and gold Nanoparticles in T=1 shell. (A) From left, schematic of modified T=1 monomers with ssDNA handles. Middle, a circular ssDNA with attached complimentary handles and tagged with CY5. Right, encapsulated ssDNA in T=1 shell. Illustration shows half shell, but a complete shell is meant. (B) From left, schematics of an empty shell, encapsulated circular ssDNA, an encapsulated single gold nanoparticle, and encapsulated gold-labeled circular ssDNA. (C) Slices of negative stain TEM tomograms of each shell in (B). (D) Laser scanned fluorescent gels of T=1 shells, with and without cargo. Both gel images are taken from the same gel but with different wavelengths. Each column of the gel is color coded with the corresponding particle in sections (C) and (D). The left gel image shows the SYBR safe emission where we see the bands for the scaffold and for assembled shells. On the right gel, emission from CY5 indicates the cargo is in the same position as the assembled shell.

[0067] FIG. 51 Design diagrams UV-welding at stacking contacts prepared with caDNAno v0.1. Protrusions and recesses have sticky overhangs and one optional, additional thymine base (yellow circle) for UV-welding in order to stabilize the partial shells in cell medium. (A) Protrusion and recess of the half octahedron (see FIG. 41A). (B)+(C) Protrusion and recess of the half T=1 shell triangles Tpent and Tring (see FIG. 40C,D). Side 1 binds to side 2 (B) and side 3 of Tpent to side 3 of Tring (C).

[0068] FIG. 52 shows representative gates for flow cytometry sample processing. From left to right: cell populations were first gated on forward scatter-area (FCS-A) versus side scatter-area (SSC-A) (gate ‘R1’), single cells were selected by gating SSC-A versus side scatter height (SSC-H) (gate ‘R2’), and then assessed for eGFP expression (gate ‘R3’). (A) Untreated cells were used as a negative control. (B) and (C) give representative gates for samples treated with anti-AAV2 only and origami half shells+anti-AAV2 respectively, at concentrations corresponding to C4 in FIG. 49.

### DETAILED DESCRIPTION OF THE INVENTION

[0069] The present disclosure provides constructs that enable the encapsulation of a virus or viral particle.

[0070] Unless defined otherwise, all technical and scientific terms used herein have the same meaning as commonly understood by those of ordinary skill in the art to which this invention pertains.

[0071] The terms “comprising” and “including” are used herein in their open-ended and non-limiting sense unless otherwise noted. With respect to such latter embodiments, the term “comprising” thus includes the narrower term “consisting of”.

[0072] The terms “a” and “an” and “the” and similar references in the context of describing the invention (especially in the context of the following claims) are to be construed to cover both the singular and the plural, unless otherwise indicated herein or clearly contradicted by context. For example, the term “a cell” includes a plurality of cells, including mixtures thereof. Where the plural form is used for compounds, salts, and the like, this is taken to mean also a single compound, salt, or the like.

[0073] Therefore, in one aspect, the disclosure provides a macromolecule-based nanostructure encasing a cavity with a diameter of at least 20 nm for encapsulating a virus or viral particle.

[0074] In the context of the present disclosure, the term “macromolecule-based nanostructure” refers to a nanostructure that is formed by the a set of macromolecules, wherein the macromolecules are selected from DNA, RNA, proteins and hybrids thereof, in particular hybrids selected from DNA-RNA hybrids and DNA-protein hybrids, including DNA-(protein linker)-DNA hybrids.

[0075] In the context of the present disclosure, the term “DNA” refers to deoxyribonucleic acid composed of a single-strand of monomeric units called nucleotides, wherein each nucleotide is composed of a nitrogen-containing nucleobase, a 2-deoxyribose sugar moiety, and a phosphate group, wherein the individual nucleotides are linked in the single-strand by a phosphate group linking the OH group in position 5′ of a 2-deoxyribose sugar moiety to the OH group in 3′ of a neighboring 2-deoxyribose sugar moiety. In particular embodiments, the nitrogen-containing nucleobases are independently selected from cytosine [C], guanine [G], adenine [A] and thymine [T]. In particular embodiments, one or more of the nucleobases are non-canonical bases, in particular a non-canonical base selected from the list of: a modified adenosine, in particular N6-carbamoyl-methyladenine or N6-methyadenine; a modified guanine, in particular 7-deazaguanine or 7-methylguanine; a modified cytosine, N4-methylcytosine, 5-carboxylcytosine, 5-formylcytosine, 5-glycosylhydroxymethylcytosine, 5-hydroxycytosine, or 5-methylcytosine; a modified thymidine, in particular α-glutamyl thymidine or α-putrescinyl thymine; a uracil or a modification thereof, in particular uracil, base J, 5-dihydroxypentauracil; or 5-hydroxymethyldeoxyuracil; deoxyarchaeosine and 2,6-diaminopurine. A stretch of a single-strand of DNA may interact with a complementary stretch of DNA by interaction of complementary nucleobases, wherein cytosine and guanine, and adenine and thymine, are complementary to each other, respectively by forming two (NT) and three (G/C) hydrogen bonds between the nucleobases. Two single-strands of DNA may be fully complementary to each other, as in the case of genomic DNA, or may be partially complementary to each other, including situations, where one single-strand of DNA is partially complementary to two or more other single-stranded DNA strands. The interaction of two complementary single-stranded DNA sequences results in the formation of a double-stranded DNA double helix.

[0076] As is well known, DNA has evolved in nature as carrier of the genetic information encoding proteins. DNA further includes non-coding regions that include regions having regulatory functions. Thus, any DNA-based application usually critically depends on the specific DNA sequence and is almost always only enabled by naming the specific DNA sequence. In contrast, in the context of the present invention, such coding and/or regulatory functions do not play any role and may or may not be present, since the underlying DNA sequences are solely designed and selected in a way that the desired arrangement of double-helical subunits is formed. Thus, in one embodiment any form of a long single-stranded DNA sequence, whether naturally occurring DNA (such as the DNA of a bacteriophage) or synthetically produced DNA may be selected as template, and a set of short single-stranded DNA sequences may be designed, wherein each sequence is complementary to one or more different parts of the template and thus forms one or more double-helical sections. Collectively, all such double-helical sections created by interaction of the full set of short single-stranded DNA sequences with the template, then form the desired three-dimensional arrangement. Starting from a given single-stranded template sequence, the design of a set of complementary can be set up using known techniques, such as, for example, the methods described for the synthesis of megadalton-scale discrete objects with structurally well-defined 3D shapes (18, 24-35). In particular, iterative design with caDNAno (37) paired with elastic-network-guided molecular dynamics simulations (38) can be used.

[0077] In addition to the interaction of complementary nucleobases of different stretches of single-stranded DNA via hydrogen bonds, additional interactions between different DNA strands are possible, including the stacking interactions between the blunt ends of two double-stranded DNA helices (36), thus enabling the design and the formation of complex DNA-based nanostructures via the shape-complementarity of double-helical subunits. Thus, two three-dimensional arrangements formed in accordance with the previous paragraph, may interact with each other by stacking interactions between double-helical subunits present on the two three-dimensional arrangements, including specific interactions between two three-dimensional arrangements having complementary protrusions and recessions (or knobs and holes), as shown, for example, in FIGS. 7-13D.

[0078] In the context of the present disclosure, the term “RNA” refers to ribonucleic acid composed of a single-strand of monomeric units called nucleotides, wherein each nucleotide is composed of a nitrogen-containing nucleobase, a ribose sugar moiety, and a phosphate group, wherein the individual nucleotides are linked in the single-strand by a phosphate group linking the OH group in position 5′ of a ribose sugar moiety to the OH group in 3′ of a neighboring ribose sugar moiety. In particular embodiments, the nitrogen-containing nucleobases are independently selected from cytosine [C], guanine [G], adenine [A] and uracil [U]. In particular embodiments, one or more of the nucleobases are non-canonical bases, in particular a non-canonical base selected from the list of: pseudouridine, ribothymidine, and inosine. Unlike DNA, RNA is most often in a single-stranded form, but the formation of double-stranded forms is possible by interaction of complementary nucleobases, wherein cytosine and guanine, and adenine and uracil, are complementary to each other, respectively by forming two (NU) and three (G/C) hydrogen bonds between the nucleobases. In a particular embodiment, the disclosure provides a macromolecule-based nanostructure, which is a RNA-based nanostructure.

[0079] In a particular embodiment, said cavity has a diameter of at least 50 nm, at least 100 nm, at least 150 nm, at least 200 nm or at least 250 nm.

[0080] In particular embodiments, said cavity has a diameter of at most 1,000 nm.

[0081] In the context of the present invention, the term “diameter” refers to the diameter of the smallest circle that is encompassed by the surface of the macromolecule-based nanostructure. For the sake of clarity, in the case of a macromolecule-based nanostructure in the form of a capsule (or spherocylinder), the diameter is the diameter of the hemispherical ends and/or the diameter of the cylindrical central part.

[0082] In a particular embodiment, the macromolecule-based nanostructure has a molecular mass of at least 1 MDa, particularly at least 10 MDa, particularly at least 20 MDa, more particularly at least 30 MDa. In other particular embodiments, the DNA-based nanostructure has a molecular mass of at least 50 MDa, at least 80 MDa, at least 100 MDa, at least 200 MDa, or at least 500 MDa. In particular embodiments, the DNA-based nanostructure has a molecular mass of at most 1,500 MDa.

[0083] In particular embodiments, the ratio between the numerical value of the molecular mass of the macromolecule-based nanostructure (in MDa) and the numerical value of the volume of the cavity encased by said macromolecule-based nanostructure (in nm³) is less than 10,000, particularly less than 9,000. In particular embodiments said ratio has a value of between 1,000 and 10,000, particularly between 2,000 and 9,000. For example, in the case of certain octahedral nanostructures, where the molecular mass is about 40 MDa, and where the encased volume is about 113,000 nm³, said ratio is about 2,800.

[0084] In particular embodiments, the ratio between the outer surface area of the macromolecule-based nanostructure covered by the macromolecules forming said macromolecule-based nanostructure and the outer surface area not covered by said macromolecules (excluding the area of the opening of a macromolecule-based nanostructure in the form of a shell) is at least 1, in particular at least 2, in particular at least 4, in particular at least 6, in particular at least 8. In other particular embodiments, the ratio is at least 10. In particular embodiments, the ratio is between 1 and 20, in particular between 2 and 18, between 4 and 16, between 6 and 14, and more particularly between 8 and 12. For example, in a case, where the macromolecule-based nanostructure is a shell in the form of a half sphere, only the area of the curved surface, but not that of the opening, i.e. the area of the flat face of the half sphere, is used for calculating said ratio.

[0085] In a particular embodiment, the present invention relates to a DNA-based nanostructure.

[0086] In a particular embodiment, the DNA-based nanostructure is formed by self-assembling DNA-based building blocks.

[0087] In a particular embodiment, each of said self-assembling DNA-based building blocks is formed by a single-stranded DNA template strand and a set of oligonucleotides complementary to said single-stranded DNA template, wherein each of said oligonucleotides is either complementary to one contiguous DNA sequence stretch or to at least two non-contiguous DNA sequence stretches on said single-stranded DNA template.

[0088] In a particular embodiment, the molecular weight of each self-assembling DNA-based building block is between 4.5 and 5.5 MDa.

[0089] In a particular embodiment, the each self-assembling DNA-based building block comprises between 7,500 and 8,500 base pairs.

[0090] In a particular embodiment, the DNA-based nanostructure consists of between 4 and 180 of such self-assembling DNA-based building blocks.

[0091] In particular embodiments, said single-stranded DNA template is single-stranded DNA of filamentous bacteriophage, or is derived from single-stranded DNA of filamentous bacteriophage.

[0092] In the context of the present invention, the term “filamentous bacteriophage” refers to a type of bacteriophage, or virus of bacteria, which is characterized by its filament-like shape that usually contains a genome of circular single-stranded DNA and infects Gram-negative bacteria. Filamentous phage includes Ff phage, such as M13, f1 and fd1 phage, and Pf1 phage.

[0093] In particular embodiments, said single-stranded DNA template has a sequence selected from SEQ ID NO: 1 (M13 8064) and 2 (M13 7249) (see Table 1). In particular embodiments, said single-stranded DNA is circular.

[0094] In the context of the present invention, a single-stranded DNA template that is “derived from single-stranded DNA of filamentous bacteriophage” refers to a DNA construct that is derived from a naturally occurring of published DNA sequence of a filamentous bacteriophage by one or more of: (i) opening of the circular structure to a linear sequence; (ii) deletion of one or more nucleotides; (iii) insertion of one or more nucleotides; (iii) substitution of one or more nucleotides; (iv) addition of one or more nucleotides; and (v) modification of one or more nucleotides. While any such variation might have detrimental, or at least rather unpredictable, effects on bacteriophage biology, its infectivity and its ability to propagate, such effects do not play any role in the context of the present invention, since, as already mentioned above, said single-stranded DNA template is only used as naked template without any requirement for having any functional property, and all structural aspects, such as the correct formation the three-dimensional shape of said self-assembling DNA-based building blocks, are implemented by the proper choice of said set of complementary oligonucleotides.

[0095] In particular embodiments, said single-stranded DNA template has at least 80%, particularly at least 90%, more particularly at least 95%, sequence identity to the sequence of a naturally occurring or published sequence of a filamentous bacteriophage, in particular to a M13, f1 or fd1 phage, in particular to a sequence selected from SEQ ID NO: 1 (M13 8064) and 2 (M13 7249).

[0096] In a particular embodiment, the DNA-based nanostructure is a closed three-dimensional geometric shape, in particular a closed three-dimensional geometric shape selected from a sphere, a spherocylinder, and a polyhedron, in particular a tetrahedron, an octahedron or an icosahedron, formed in situ from said self-assembling DNA-based building blocks in the presence of said virus or viral particle to be encapsulated.

[0097] In another particular embodiment, the DNA-based nanostructure is a shell with an opening for accessing said cavity.

[0098] In the context of the present invention, the term “shell” refers to a structure that is a part of a closed three-dimensional geometric shape, in particular a closed three-dimensional geometric shape selected from a sphere, a spherocylinder, and a polyhedron, in particular a tetrahedron or an octahedron,

[0099] In yet another particular embodiment, the DNA-based nanostructure is a combination of a first shell and a second shell with an opening to access a first and a second inner cavity, respectively, wherein said first and said second inner cavity together form said cavity.

[0100] In a particular embodiment, said first and said second shells are connected by at least one linker.

[0101] In particular embodiments, said linker is a linker selected from a DNA linker, an RNA linker, a polypeptide linker, a protein linker and a chemical linker.

[0102] In the context of the present invention, the term “DNA linker” refers to a linker formed from DNA, wherein the sequence of said DNA linker is not complementary to the DNA of said single-stranded DNA template or to any of said set of oligonucleotides complementary to said single-stranded DNA template, wherein said DNA linker is linked at one terminus to a DNA sequence forming a self-assembling DNA-based building block of said first shell, and at the other terminus to a DNA sequence forming a self-assembling DNA-based building block of said second shell.

[0103] In the context of the present invention, the term “polypeptide linker” refers to a linker formed from at least 2, particularly at least 5, at least 10, or at least 20 amino acid residues linked by peptide bonds, wherein said polypeptide has no tertiary or quaternary structure, and wherein said polypeptide linker is linked at one terminus to a DNA sequence forming a self-assembling DNA-based building block of said first shell, and at the other terminus to a DNA sequence forming a self-assembling DNA-based building block of said second shell.

[0104] In the context of the present invention, the term “protein linker” refers to a linker formed from at least 20, particularly at least 50, at least 100, at least 200 amino acid residues, at least 500 amino acid residues, or at least 1,000 amino acid residues, particularly less than 1,500 amino acid residues linked by peptide bonds, wherein said polypeptide has tertiary and/or quaternary structure, and wherein said protein linker is linked at one terminus to a DNA sequence forming a self-assembling DNA-based building block of said first shell, and at the other terminus to a DNA sequence forming a self-assembling DNA-based building block of said second shell. In particular embodiments, said protein linker is covalently attached to said DNA sequences. In particular other embodiments, said protein linker is non-covalently attached to said DNA sequences, in particular wherein said protein linker is an antibody-based protein linker, in particular selected from a diabody and a full antibody, including an IgG antibody.

[0105] In the context of the present invention, the term “chemical linker” refers to a continuous chain of between 1 and 30 atoms (e.g. 1, 2, 3, 4, 5, 6, 7, 8, 9, 10, 11, 12, 13, 14, 15, 16, 17, 18, 19, 20, 21, 22, 23, 24, 25, 26, 27, 28, 29, or 30 atoms; thus, in the context of the present invention, the term “between” is used so that the borders mentioned are included) in its backbone, i.e. the length of the linker is defined as the shortest connection as measured by the number of atoms or bonds between the two DNA sequences linked by said chemical linker. In the context of the present invention, a chemical linker preferably is an C₁₋₂₀-alkylene, C₁₋₂₀-heteroalkylene, C₂₋₂₀-alkenylene, C₂₋₂₀-heteroalkenylene, C₂₋₂₀-alkynylene, C₂₋₂₀-heteroalkynylene, cycloalkylene, heterocycloalkylene, arylene, heteroarylene, aralkylene, or a heteroaralkylene group, which may optionally be substituted. The linker may contain one or more structural elements such as carboxamide, ester, ether, thioether, disulfide, urea, thiourea, hydrocarbon moieties and the like. The linker may also contain combinations of two or more of these structural elements. Each one of these structural elements may be present in the linker more than once, e.g. twice, three times, four times, five times, or six times. In some embodiments the linker may comprise a disulfide bond. It is understood that the linker has to be attached either in a single step or in two or more subsequent steps to the two DNA sequences linked by said chemical linker. To that end the linker to be will carry two groups, preferably at a proximal and distal end, which can (i) form a covalent bond to a group present in one of the two DNA sequences to be linked, or (ii) which is or can be activated to form a covalent bond with one of the two DNA sequences.

[0106] In a particular embodiment, the DNA-based nanostructure is based on an icosahedral structure.

[0107] In a particular embodiment, each of said self-assembling DNA-based building blocks is a prismoid.

[0108] In the context of the present invention, the term “prismoid” refers to a polyhedron, wherein all vertices lie in two parallel planes.

[0109] In particular embodiments, said prismoid is a triangular prismoid. In other embodiments, said prismoid is a rectangular prismoid.

[0110] In particular embodiments, the DNA-based nanostructure is based on a mixture of a triangular and a rectangular prismoid.

[0111] In a particular embodiment, the present invention relates to a DNA-based nanostructure,

wherein each said triangular, or said rectangular prismoid, is formed by m triangular, or rectangular, respectively, planes, wherein m is an integer independently selected from 4, 5, 6, 7 and 8, in particular independently selected from 5, 6 and 7, more particularly wherein said integer is 6.
wherein the three, or four, respectively, edges of each of said m planes are formed by n parallel stretches of DNA double helices, wherein n is an integer independently selected from 1, 2, 3, 4, 5 and 6 in particular independently selected from 2, 3, 4 and 5, more particularly independently selected from 3 and 4,
wherein each plane is connected to a plane above and/or a plane beyond said plane (i) by stacking interactions between the DNA double helices forming said planes, and (ii) partially by DNA stretches within said single-stranded DNA template and/or said oligonucleotides forming said DNA-based building block bridging at least two of said planes, and
wherein at least two of the three, or four, respectively, side trapezoids comprises a specific pattern of recesses and/or extrusions formed by missing or additional DNA double helical stretches for specific interaction with a complementary pattern on the side trapezoid of another one of said self-assembling DNA-based building blocks.

[0112] In a particular embodiment, the average length of each of the n stretches of DNA double helices in the m planes of a triangular, or rectangular, respectively, prismoid is between 80 and 200 base pairs.

[0113] In particular embodiments, said triangular prismoid is a triangular frustum. In particular embodiments, said rectangular prismoid is a rectangular frustum.

[0114] In the context of the present invention, the term “triangular frustum” refers to a three-dimensional geometric shape in the form of a triangular pyramid, and the term “rectangular frustum” refers to a three-dimensional geometric shape in the form of a rectangular pyramid, where the tip of the pyramid has been removed resulting in a plane on the top parallel to the basis of the pyramid.

[0115] In a particular embodiment, for at least part of said self-assembling DNA-based building blocks the length of at least one edge of each of said m planes is decreasing from the first to the m^{th} plane, so that a bevel angle results between planes perpendicular to said first plane and the trapezoid plane formed by said m edges (see FIG. 5). In particular embodiments, all three, or four, respectively, trapezoid planes exhibit a bevel angle.

[0116] In a particular embodiment, a bevel angle is between 16° and 26°, particularly between 18° and 24°, more particularly between 20° and 22°, most particularly about 20.9°.

[0117] In a particular embodiment, said DNA-based nanostructure comprises at least one set of self-assembling DNA-based building blocks, wherein all three, or four, respectively, side trapezoids comprises a specific pattern of recesses and/or extrusions formed by missing or additional DNA double helical stretches for specific interaction with a complementary pattern on the side trapezoid of another one of said self-assembling DNA-based building blocks.

[0118] In a particular embodiment, particularly in the case of a DNA-based nanostructure closed three-dimensional geometric shape, all said self-assembling DNA-based building blocks are identical.

[0119] In a particular embodiment, said DNA-based nanostructure comprises two or more sets of self-assembling DNA-based building blocks.

[0120] In a particular embodiment, said DNA-based nanostructure is rod-shaped.

[0121] In particular embodiments, said DNA-based nanostructure comprises two or more sets of self-assembling DNA-based building blocks.

[0122] In particular such embodiment, said rod-shaped DNA-based nanostructure comprises at least a first and a second set of self-assembling DNA-based building blocks, wherein said first and set second set differ at least with respect to the bevel angles. In a particular embodiment, at least one set consists of self-assembling DNA-based building blocks exhibiting only two bevel angles. In a particular embodiment, said at least one set consists of rectangular frusta, which comprise a bevel angle on each of two opposing trapezoids.

[0123] In a particular embodiment, the side trapezoids forming the rim of said shell, or of said first and second shell, respectively, do not comprises a specific pattern of recesses and/or extrusions formed by missing or additional DNA double helical stretches for specific interaction with a complementary pattern on the side trapezoid of another one of said self-assembling DNA-based building blocks.

[0124] In a particular embodiment, said DNA-based nanostructure is a shell selected from
[0125] (i) a half octahedron (FIG. 4A), which consists of a set of four copies of a triangular frustum, wherein the base-pair stacking contacts on one of the triangular edges of the triangular frustum are inactivated by either strand shortening or by adding unpaired thymidines (FIG. 4A, see FIG. 24A,D);
[0126] (ii) a half T=1 shell (FIG. 4B), which consists of two sets of in each case five copies of two different triangular frusta, wherein the five copies of the first set form a closed pentamer, and the five copies of the second set dock onto the edges of said pentamer (FIG. 4B, see FIG. 24B,E); and
[0127] (iii) a “trap” T=1 shell with a missing pentagon vertex (FIG. 4C), which consists of three sets of in each case five copies of three different triangular frusta, wherein the five copies of the first set form a closed pentamer, the five copies of the second set dock onto the edges of said pentamer the five copies of the second set dock onto the edges of said pentamer, and the five copies of the third set dock into the gaps between the five copies of said second set (FIG. 4C, see FIG. 24C,F).

[0128] In a particular embodiment, the present invention relates to a DNA-based nanostructure further comprising one or more types of DNA brick constructs, each type of such DNA brick constructs being characterized by one or more interaction sites for specific interaction by edge-to-edge stacking contacts with one or more complementary interaction sites present on the plane of said triangular, or rectangular, respectively, prismoid on the outer surface of said DNA-based nanostructure, wherein said DNA brick constructs cover the free space between the three, or four, respectively, edges of said plane (see FIG. 33).

[0129] In a particular embodiment, the present invention relates to a DNA-based nanostructure further comprising one or more cross-linkages within one of said triangular, or rectangular, respectively, prismoids, and/or between two of said triangular, or rectangular, respectively, prismoids.

[0130] In the context of the present invention, the term “cross-linkage” refers to any permanent or intermittent linkage within one of said triangular, or rectangular, respectively, prismoids, and/or between two of said triangular, or rectangular, respectively, prismoids. Any such linkage may be achieved a priori by linking two of the oligonucleotides being used for forming the self-assembling DNA-based building blocks prior to the assembly, or a priori, e. g. by chemically or photochemically adding linkages between different parts of the three-dimensional nanostructure. Permanent linkages may, for example, be created by photochemically cross-linking T residues appropriately positioned in the structure under formation of covalent cyclobutane pyrimidine dimer (CPD) bonds (41), and intermittent linkages may, for example, be created by photochemically cross-linking the blunt ends of two double-helical subunits between a 3-cyanovinylcarbazole (cnvK) moiety positioned at a first blunt end and a thymine residue (T) positioned at the other blunt end (40).

[0131] In a particular embodiment, the present invention relates to a macromolecule-based nanostructure further comprising at least one moiety specifically interacting with said virus or viral particle.

[0132] In particular embodiments, said macromolecule-based nanostructure is a DNA-based nanostructure in accordance with the present invention, wherein said at least one moiety is linked to one of said triangular, or rectangular, respectively, prismoids forming the DNA-based nanostructure in a way that said at least one moiety is located on the inside of said DNA-based nanostructure and is pointing into the cavity formed by said DNA-based nanostructure.

[0133] In particular embodiments, said at least one moiety is specifically interacting with said virus or viral particle by being able to specifically bind to said virus or virus particle. In particular embodiments, said at least one moiety is an antibody or a binding moiety based on an antibody comprising at least an antigen-binding site of an antibody, in particular at least a VH domain of an antibody or at least a combination of a VH and a VL domain of an antibody.

[0134] In particular embodiments, said at least one moiety is specifically interacting with said virus or viral particle by being able to bind to inactivate said virus or virus particle.

[0135] In particular embodiments, said macromolecule-based nanostructure comprises, on average, between one and 10 antibody-based binding sites attached to the interior site of the cavity formed by said macromolecule-based nanostructure, in particular between 4 and 10, in particular four, five, six, seven, eight, nine or ten embodiments, antibody-based binding sites.

[0136] In particular such embodiments, said antibody-based binding site is a single-chain Fv (scFv) fragment.

[0137] In particular such embodiment, wherein said macromolecule-based nanostructure is a oligonucleotide-based nanostructure, said antibody-based binding site, in particular said scFv fragment, is linked to a single-stranded oligonucleotide having a sequence that is complementary to, or otherwise able enter site-specific interactions with, oligonucleotide stretches present in the interior of the cavity formed by said oligonucleotide-based nanostructure.

[0138] In another aspect, the disclosure provides a composition comprising a virus or viral particle encapsulated by a macromolecule-based nanostructure according to the present invention.

[0139] In particular embodiments, said composition is formed in a process of removing said virus or viral particle from a medium containing said virus or viral particle. In particular other embodiments, said composition is formed in a process of incorporating said virus or viral particle as cargo in said macromolecule-based nanostructure.

[0140] In another aspect, the disclosure provides a composition comprising a cargo different from a virus or viral particle, where said cargo, such as a complex macromolecule, is encapsulated by a macromolecule-based nanostructure according to the present invention

[0141] In yet another aspect, the disclosure provides a method for encapsulating a virus or viral particle, comprising the steps of: providing a macromolecule-based nanostructure according to the present invention, and contacting said macromolecule-based nanostructure with a medium comprising, or suspected to comprise, said virus or viral particle.

[0142] In particular embodiments, said method is for removing said virus or viral particle from said medium. In particular embodiment, said method is for encapsulating said virus or viral particle in order to transport said virus or viral particle.

[0143] In yet another aspect, the disclosure provides a method for encapsulating a cargo different from a virus or viral particle, such as a complex macromolecule, comprising the steps of: providing a macromolecule-based nanostructure according to the present invention, and contacting said macromolecule-based nanostructure with a medium comprising, or suspected to comprise, said cargo.

TABLE 1
Sequence listing.

| SEQ ID NO: | Description | Sequence / Details |
|---|---|---|
| | Templates | |
| 1 | M138064 | GGCAATGACCTGATAGCCTTTGTAGATCTCTCAAAAATAGCTACCCTCTCCGGCATTAATTTATCAGCT |
| | | AGAACGGTTGAATATCATATTGATGGTGATTTGACTGTCTCCGGCCTTTCTCACCCTTTTGAATCTTTA |
| | | CCTACACATTACTCAGGCATTGCATTTAAAATATATGAGGGTTCTAAAAATTTTTATCCTTGCGTTGAAA |
| | | TAAAGGCTTCTCCCGCAAAAGTATTACAGGGTCATAATGTTTTTGGTACAACCGATTTAGCTTTATGCT |
| | | CTGAGGCTTTATTGCTTAATTTTGCTAATTCTTTGCCTTGCCTGTATGATTTATTGGATGTTAATGCTAC |
| | | TACTATTAGTAGAATTGATGCCACCTTTTCAGCTCGCGCCCCAAATGAAAATATAGCTAAACAGGTTAT |
| | | TGACCATTTGCGAAATGTATCTAATGGTCAAACTAAATCTACTCGTTCGCAGAATTGGGAATCAACTGT |
| | | TATATGGAATGAAACTTCCAGACACCGTACTTTAGTTGCATATTTAAAACATGTTGAGCTACAGCATTA |
| | | TATTCAGCAATTAAGCTCTAAGCCATCCGCAAAAATGACCTCTTATCAAAAGGAGCAATTAAAGGTACT |
| | | CTCTAATCCTGACCTGTTGGAGTTTGCTTCCGGTCTGGTTCGCTTTGAAGCTCGAATTAAAACGCGAT |
| | | ATTTGAAGTCTTTCGGGCTTCCTCTTAATCTTTTTGATGCAATCCGCTTTGCTTCTGACTATAATAGTCA |
| | | GGGTAAAGACCTGATTTTTGATTTATGGTCATTCTCGTTTTCTGAACTGTTTAAAGCATTTGAGGGGGA |
| | | TTCAATGAATATTTATGACGATTCCGCAGTATTGGACGCTATCCAGTCTAAACATTTTACTATTACCCC |
| | | CTCTGGCAAAACTTCTTTTGCAAAAGCCTCTCGCTATTTTGGTTTTTATCGTCGTCTGGTAAACGAGGG |
| | | TTATGATAGTGTTGCTCTTACTATGCCTCGTAATTCCTTTTGGCGTTATGTATCTGCATTAGTTGAATGT |
| | | GGTATTCCTAAATCTCAACTGATGAATCTTTCTACCTGTAATAATGTTGTTCCGTTAGTTCGTTTTATTA |
| | | ACGTAGATTTTTCTTCCCAACGTCCTGACTGGTATAATGAGCCAGTTCTTAAAATCGCATAAGGTAATT |
| | | CACAATGATTAAAGTTGAAATTAAACCATCTCAAGCCCAATTTACTACTCGTTCTGGTGTTTCTCGTCA |
| | | GGGCAAGCCTTATTCACTGAATGAGCAGCTTTGTTACGTTGATTTGGGTAATGAATATCCGGTTCTTG |
| | | TCAAGATTACTCTTGATGAAGGTCAGCCAGCCTATGCGCCTGGTCTGTACACCGTTCATCTGTCCTCT |
| | | TTCAAAGTTGGTCAGTTCGGTTCCCTTATGATTGACCGTCTGCGCCTCGTTCCGGCTAAGTAACATGG |
| | | AGCAGGTCGCGGATTTCGACACAATTTATCAGGCGATGATACAAATCTCCGTTGTACTTTGTTTCGCG |
| | | CTTGGTATAATCGCTGGGGGTCAAAGATGAGTGTTTTAGTGTATTCTTTTGCCTCTTTCGTTTTAGGTT |
| | | GGTGCCTTCGTAGTGGCATTACGTATTTTACCCGTTTAATGGAAACTTCCTCATGAAAAAGTCTTTAGT |
| | | CCTCAAAGCCTCTGTAGCCGTTGCTACCCTCGTTCCGATGCTGTCTTTCGCTGCTGAGGGTGACGAT |
| | | CCCGCAAAAGCGGCCTTTAACTCCCTGCAAGCCTCAGCGACCGAATATATCGGTTATGCGTGGGCGA |
| | | TGGTTGTTGTCATTGTCGGCGCAACTATCGGTATCAAGCTGTTTAAGAAATTCACCTCGAAAGCAAGC |
| | | TGATAAACCGATACAATTAAAGGCTCCTTTTGGAGCCTTTTTTTTGGAGATTTTCAACGTGAAAAAATT |
| | | ATTATTCGCAATTCCTTTAGTTGTTCCTTTCTATTCTCACTCCGCTGAAACTGTTGAAAGTTGTTTAGCA |
| | | AAATCCCATACAGAAAATTCATTTACTAACGTCTGGAAAGACGACAAAACTTTAGATCGTTACGCTAAC |
| | | TATGAGGGCTGTCTGTGGAATGCTACAGGCGTTGTAGTTTGTACTGGTGACGAAACTCAGTGTTACG |
| | | GTACATGGGTTCCTATTGGGCTTGCTATCCCTGAAAATGAGGGTGGTGGCTCTGAGGGTGGCGGTTC |
| | | TGAGGGTGGCGGTTCTGAGGGTGGCGGTACTAAACCTCCTGAGTACGGTGATACACCTATTCCGGG |
| | | CTATACTTATATCAACCCTCTCGACGGCACTTATCCGCCTGGTACTGAGCAAAACCCCGCTAATCCTA |
| | | ATCCTTCTCTTGAGGAGTCTCAGCCTCTTAATACTTTCATGTTTCAGAATAATAGGTTCCGAAATAGGC |
| | | AGGGGGCATTAACTGTTTATACGGGCACTGTTACTCAAGGCACTGACCCCGTTAAAACTTATTACCAG |
| | | TACACTCCTGTATCATCAAAAGCCATGTATGACGCTTACTGGAACGGTAAATTCAGAGACTGCGCTTT |
| | | CCATTCTGGCTTTAATGAGGATTTATTTGTTTGTGAATATCAAGGCCAATCGTCTGACCTGCCTCAACC |
| | | TCCTGTCAATGCTGGCGGCGGCTCTGGTGGTGGTTCTGGTGGCGGCTCTGAGGGTGGTGGCTCTGA |
| | | GGGTGGCGGTTCTGAGGGTGGCGGCTCTGAGGGAGGCGGTTCCGGTGGTGGCTCTGGTTCCGGTG |
| | | ATTTTGATTATGAAAAGATGGCAAACGCTAATAAGGGGGCTATGACCGAAAATGCCGATGAAAACGC |
| | | GCTACAGTCTGACGCTAAAGGCAAACTTGATTCTGTCGCTACTGATTACGGTGCTGCTATCGATGGTT |
| | | TCATTGGTGACGTTTCCGGCCTTGCTAATGGTAATGGTGCTACTGGTGATTTTGCTGGCTCTAATTCC |
| | | CAAATGGCTCAAGTCGGTGACGGTGATAATTCACCTTTAATGAATAATTTCCGTCAATATTTACCTTCC |
| | | CTCCCTCAATCGGTTGAATGTCGCCCTTTTGTCTTTGGCGCTGGTAAACCATATGAATTTTCTATTGAT |
| | | TGTGACAAAATAAACTTATTCCGTGGTGTCTTTGCGTTTCTTTTATATGTTGCCACCTTTATGTATGTAT |
| | | TTTCTACGTTTGCTAACATACTGCGTAATAAGGAGTCTTAATCATGCCAGTTCTTTTGGGTATTCCGTT |
| | | ATTATTGCGTTTCCTCGGTTTCCTTCTGGTAACTTTGTTCGGCTATCTGCTTACTTTTCTTAAAAAGGG |
| | | CTTCGGTAAGATAGCTATTGCTATTTCATTGTTTCTTGCTCTTATTATTGGGCTTAACTCAATTCTTGTG |
| | | GGTTATCTCTCTGATATTAGCGCTCAATTACCCTCTGACTTTGTTCAGGGTGTTCAGTTAATTCTCCCG |
| | | TCTAATGCGCTTCCCTGTTTTTATGTTATTCTCTCTGTAAAGGCTGCTATTTTCATTTTTGACGTTAAAC |
| | | AAAAAATCGTTTCTTATTTGGATTGGGATAAATAATATGGCTGTTTATTTTGTAACTGGCAAATTAGGCT |
| | | CTGGAAAGACGCTCGTTAGCGTTGGTAAGATTCAGGATAAAATTGTAGCTGGGTGCAAAATAGCAACT |
| | | AATCTTGATTTAAGGCTTCAAAACCTCCCGCAAGTCGGGAGGTTCGCTAAAACGCCTCGCGTTCTTAG |
| | | AATACCGGATAAGCCTTCTATATCTGATTTGCTTGCTATTGGGCGCGGTAATGATTCCTACGATGAAA |
| | | ATAAAAACGGCTTGCTTGTTCTCGATGAGTGCGGTACTTGGTTTAATACCCGTTCTTGGAATGATAAG |
| | | GAAAGACAGCCGATTATTGATTGGTTTCTACATGCTCGTAAATTAGGATGGGATATTATTTTTCTTGTT |
| | | CAGGACTTATCTATTGTTGATAAACAGGCGCGTTCTGCATTAGCTGAACATGTTGTTTATTGTCGTCGT |
| | | CTGGACAGAATTACTTTACCTTTTGTCGGTACTTTATATTCTCTTATTACTGGCTCGAAAATGCCTCTG |
| | | CCTAAATTACATGTTGGCGTTGTTAAATATGGCGATTCTCAATTAAGCCCTACTGTTGAGCGTTGGCTT |
| | | TATACTGGTAAGAATTTGTATAACGCATATGATACTAAACAGGCTTTTTCTAGTAATTATGATTCCGGT |
| | | GTTTATTCTTATTTAACGCCTTATTTATCACACGGTCGGTATTTCAAACCATTAAATTTAGGTCAGAAGA |
| | | TGAAATTAACTAAAATATATTTGAAAAAGTTTTCTCGCGTTCTTTGTCTTGCGATTGGATTTGCATCAGC |
| | | ATTTACATATAGTTATATAACCCAACCTAAGCCGGAGGTTAAAAAGGTAGTCTCTCAGACCTATGATTT |
| | | TGATAAATTCACTATTGACTCTTCTCAGCGTCTTAATCTAAGCTATCGCTATGTTTTCAAGGATTCTAAG |
| | | GGAAAATTAATTAATAGCGACGATTTACAGAAGCAAGGTTATTCACTCACATATATTGATTTATGTACT |
| | | GTTTCCATTAAAAAAGGTAATTCAAATGAAATTGTTAAATGTAATTAATTTTGTTTTCTTGATGTTTGTTT |
| | | CATCATCTTCTTTGCTCAGGTAATTGAAATGAATAATTCGCCTCTGCGCGATTTTGTAACTTGGTATT |
| | | CAAAGCAATCAGGCGAATCCGTTATTGTTTCTCCCGATGTAAAAGGTACTGTTACTGTATATTCATCTG |
| | | ACGTTAAACCTGAAAATCTACGCAATTTCTTTATTTCTGTTTTACGTGCAAATAATTTTGATATGGTAGG |
| | | TTCTAACCCTTCCATTATTCAGAAGTATAATCCAAACAATCAGGATTATATTGATGAATTGCCATCATCT |
| | | GATAATCAGGAATATGATGATAATTCCGCTCCTTCTGGTGGTTTCTTTGTTCCGCAAAATGATAATGTT |
| | | ACTCAAACTTTTAAAATTAATAACGTTCGGGCAAAGGATTTAATACGAGTTGTCGAATTGTTTGTAAAG |
| | | TCTAATACTTCTAAATCCTCAAATGTATTATCTATTGACGGCTCTAATCTATTAGTTGTTAGTGCTCCTA |
| | | AAGATATTTTAGATAACCTTCCTCAATTCCTTTCAACTGTTGATTTGCCAACTGACCAGATATTGATTGA |
| | | GGGTTTGATATTTGAGGTTCAGCAAGGTGATGCTTTAGATTTTTCATTTGCTGCTGGCTCTCAGCGTG |
| | | GCACTGTTGCAGGCGGTGTTAATACTGACCGCCTCACCTCTGTTTTATCTTCTGCTGGTGGTTCGTTC |
| | | GGTATTTTTAATGGCGATGTTTTAGGGCTATCAGTTCGCGCATTAAAGACTAATAGCCATTCAAAAATA |
| | | TTGTCTGTGCCACGTATTCTTACGCTTTCAGGTCAGAAGGGTTCTATCTCTGTTGGCCAGAATGTCCC |
| | | TTTTATTACTGGTCGTGTGACTGGTGAATCTGCCAATGTAAATAATCCATTTCAGACGATTGAGCGTCA |
| | | AAATGTAGGTATTTCCATGAGCGTTTTTCCTGTTGCAATGGCTGGCGGTAATATTGTTCTGGATATTAC |
| | | CAGCAAGGCCGATAGTTTGAGTTCTTCTACTCAGGCAAGTGATGTTATTACTAATCAAAGAAGTATTG |
| | | CTACAACGGTTAATTTGCGTGATGGACAGACTCTTTTACTCGGTGGCCTCACTGATTATAAAAACACTT |
| | | CTCAGGATTCTGGCGTACCGTTCCTGTCTAAAATCCCTTTAATCGGCCTCCTGTTTAGCTCCCGCTCT |
| | | GATTCTAACGAGGAAAGCACGTTATACGTGCTCGTCAAAGCAACCATAGTACGCGCCCTGTAGCGGC |
| | | GCATTAAGCGCGGCGGGTGTGGTGGTTACGCGCAGCGTGACCGCTACACTTGCCAGCGCCCTAGCG |
| | | CCCGCTCCTTTCGCTTTCTTCCCTTCCTTTCTCGCCACGTTCGCCGGCTTTCCCCGTCAAGCTCTAAA |
| | | TCGGGGGCTCCCTTTAGGGTTCCGATTTAGTGCTTTACGGCACCTCGACCCCAAAAAACTTGATTTGG |
| | | GTGATGGTTCACGTAGTGGGCCATCGCCCTGATAGACGGTTTTTCGCCCTTTGACGTTGGAGTCCAC |
| | | GTTCTTTAATAGTGGACTCTTGTTCCAAACTGGAACAACACTCAACCCTATCTCGGGCTATTCTTTTGA |
| | | TTTATAAGGGATTTTGCCGATTTCGGAACCACCATCAAACAGGATTTTCGCCTGCTGGGGCAAACCAG |
| | | CGTGGACCGCTTGCTGCAACTCTCTCAGGGCCAGGCGGTGAAGGGCAATCAGCTGTTGCCCGTCTC |
| | | ACTGGTGAAAAGAAAAACCACCCTGGCGCCCAATACGCAAACCGCCTCTCCCCGCGCGTTGGCCGA |
| | | TTCATTAATGCAGCTGGCACGACAGGTTTCCCGACTGGAAAGCGGGCAGTGAGCGCAACGCAATTAA |
| | | TGTGAGTTAGCTCACTCATTAGGCACCCCAGGCTTTACACTTTATGCTTCCGGCTCGTATGTTGTGTG |
| | | GAATTGTGAGCGGATAACAATTTCACACAGGAAACAGCTATGACCATGATTACGAATTCGAGCTCGGT |
| | | ACCCGGGGATCCTCAACTGTGAGGAGGCTCACGGACGCGAAGAACAGGCACGCGTGCTGGCAGAA |
| | | ACCCCCGGTATGACCGTGAAAACGGCCCGCCGCATTCTGGCCGCAGCACCACAGAGTGCACAGGCG |
| | | CGCAGTGACACTGCGCTGGATCGTCTGATGCAGGGGGCACCGGCACCGCTGGCTGCAGGTAACCC |
| | | GGCATCTGATGCCGTTAACGATTTGCTGAACACACCAGTGTAAGGGATGTTTATGACGAGCAAAGAAA |
| | | CCTTTACCCATTACCAGCCGCAGGGCAACAGTGACCCGGCTCATACCGCAACCGCGCCCGGCGGAT |
| | | TGAGTGCGAAAGCGCCTGCAATGACCCCGCTGATGCTGGACACCTCCAGCCGTAAGCTGGTTGCGT |
| | | GGGATGGCACCACCGACGGTGCTGCCGTTGGCATTCTTGCGGTTGCTGCTGACCAGACCAGCACCA |
| | | CGCTGACGTTCTACAAGTCCGGCACGTTCCGTTATGAGGATGTGCTCTGGCCGGAGGCTGCCAGCG |
| | | ACGAGACGAAAAAACGGACCGCGTTTGCCGGAACGGCAATCAGCATCGTTTAACTTTACCCTTCATC |
| | | ACTAAAGGCCGCCTGTGCGGCTTTTTTTAGGGGATTTTTTTATGTCGATGTACACAACCGCCCAACTG |
| | | CTGGCGGCAAATGAGCAGAAATTTAAGTTTGATCCGCTGTTTCTGCGTCTCTTTTTCCGTGAGAGCTA |
| | | TCCCTTCACCACGGAGAAAGTCTATCTCTCACAAATTCCGGGACTGGTAAACATGGCGCTGTACGTTT |
| | | CGCCGATTGTTTCCGGTGAGGTTATCCGTTCCCGTGGCGGCTCCACCTCTGAAAGCTTGGCACTGGC |
| | | CGTCGTTTTACAACGTCGTGACTGGGAAAACCCTGGCGTTACCCAACTTAATCGCCTTGCAGCACATC |
| | | CCCCTTTCGCCAGCTGGCGTAATAGCGAAGAGGCCCGCACCGATCGCCCTTCCCAACAGTTGCGCA |
| | | GCCTGAATGGCGAATGGCGCTTTGCCTGGTTTCCGGCACCAGAAGCGGTGCCGGAAAGCTGGCTGG |
| | | AGTGCGATCTTCCTGAGGCCGATACTGTCGTCGTCCCCTCAAACTGGCAGATGCACGGTTACGATGC |
| | | GCCCATCTACACCAACGTGACCTATCCCATTACGGTCAATCCGCCGTTTGTTCCCACGGAGAATCCG |
| | | ACGGGTTGTTACTCGCTCACATTTAATGTTGATGAAAGCTGGCTACAGGAAGGCCAGACGCGAATTAT |
| | | TTTTGATGGCGTTGGTATTGGTTAAAAAATGAGGTGATTTAACAAAAAlTTAATGCGAAlTTTAACAAAA |
| | | TATTAACGTTTACAATTTAAATATTTGCTTATACAATCTTCCTGTTTTTGGGGGTTTTCTGATTATCAACC |
| | | GGGGTACATATGATTGACATGCTAGTTTTACGATTACCGTTCATCGATTCTCTTGTTTGCTCCAGACTC |
| | | TCA |
| 2 | M13 7249 | TGATAGACGGTTTTTGGCCCTTTGACGTTGGAGTCCACGTTCTTTAATAGTGGACTCTTGTTCCAAACT |
| | | GGAACAACACTCAACCCTATCTCGGGCTATTCTTTTGATTTATAAGGGATTTTGCCGATTTCGGAACCA |
| | | CCATCAAACAGGATTTTCGCCTGCTGGGGCAAACCAGCGTGGACCGCTTGCTGCAACTCTCTCAGGG |
| | | CCAGGCGGTGAAGGGCAATCAGCTGTTGCCCGTCTCACTGGTGAAAAGAAAAACCACCCTGGCGCC |
| | | CAATACGCAAACCGCCTCTCCCCGCGCGTTGGCCGATTCATTAATGCAGCTGGCACGACAGGTTTCC |
| | | CGACTGGAAAGCGGGCAGTGAGCGCAACGCAATTAATGTGAGTTAGCTCACTCATTAGGCACCCCAG |
| | | GCTTTACACTTTATGCTTCCGGCTCGTATGTTGTGTGGAATTGTGAGCGGATAACAATTTCACACAGG |
| | | AAACAGCTATGACCATGATTACGAATTCGAGCTCGGTACCCGGGGATCCTCTAGAGTCGACCTGCAG |
| | | GCATGCAAGCTTGGCACTGGCCGTCGTTTTACAACGTCGTGACTGGGAAAACCCTGGCGTTACCCAA |
| | | CTTAATCGCCTTGCAGCACATCCCCCTTTCGCCAGCTGGCGTAATAGCGAAGAGGCCCGCACCGATC |
| | | GCCCTTCCCAACAGTTGCGCAGCCTGAATGGCGAATGGCGCTTTGCCTGGTTTCCGGCACCAGAAG |
| | | CGGTGCCGGAAAGCTGGCTGGAGTGCGATCTTCCTGAGGCCGATACTGTCGTCGTCCCCTCAAACT |
| | | GGCAGATGCACGGTTACGATGCGCCCATCTACACCAACGTGACCTATCCCATTACGGTCAATCCGCC |
| | | GTTTGTTCCCACGGAGAATCCGACGGGTTGTTACTCGCTCACATTTAATGTTGATGAAAGCTGGCTAC |
| | | AGGAAGGCCAGACGCGAATTATTTTTGATGGCGTTCCTATTGGTTAAAAAATGAGCTGATTTAACAAA |
| | | AATTTAATGCGAATTTTAACAAAATATTAACGTTTACAATTTAAATATTTGCTTATACAATCTTCCTGTTT |
| | | TTGGGGCTTTTCTGATTATCAACCGGGGTACATATGATTGACATGCTAGTTTTACGATTACCGTTCATC |
| | | GATTCTCTTGTTTGCTCCAGACTCTCAGGCAATGACCTGATAGCCTTTGTAGATCTCTCAAAAATAGCT |
| | | ACCCTCTCCGGCATTAATTTATCAGCTAGAACGGTTGAATATCATATTGATGGTGATTTGACTGTCTCC |
| | | GGCCTTTCTCACCCTTTTGAATCTTTACCTACACATTACTCAGGCATTGCATTTAAAATATATGAGGGT |
| | | TCTAAAAATTTTTATCCTTGCGTTGAAATAAAGGCTTCTCCCGCAAAAGTATTACAGGGTCATAATGTT |
| | | TTTGGTACAACCGATTTAGCTTTATGCTCTGAGGCTTTATTGCTTAATTTTGCTAATTCTTTGCCTTGCC |
| | | TGTATGATTTATTGGATGTTAATGCTACTACTATTAGTAGAATTGATGCCACCTTTTCAGCTCGCGCCC |
| | | CAAATGAAAATATAGCTAAACAGGTTATTGACCATTTGCGAAATGTATCTAATGGTCAAACTAAATCTA |
| | | CTCGTTCGCAGAATTGGGAATCAACTGTTATATGGAATGAAACTTCCAGACACCGTACTTTAGTTGCA |
| | | TATTTAAAACATGTTGAGCTACAGCATTATATTCAGCAATTAAGCTCTAAGCCATCCGCAAAAATGACC |
| | | TCTTATCAAAAGGAGCAATTAAAGGTACTCTCTAATCCTGACCTGTTGGAGTTTGCTTCCGGTCTGGTT |
| | | CGCTTTGAAGCTCGAATTAAAACGCGATATTTGAAGTCTTTCGGGCTTCCTCTTAATCTTTTTGATGCA |
| | | ATCCGCTTTGCTTCTGACTATAATAGTCAGGGTAAAGACCTGATTTTTGATTTATGGTCATTCTCGTTTT |
| | | CTGAACTGTTTAAAGCATTTGAGGGGGATTCAATGAATATTTATGACGATTCCGCAGTATTGGACGCT |
| | | ATCCAGTCTAAACATTTTACTATTACCCCCTCTGGCAAAACTTCTTTTGCAAAAGCCTCTCGCTATTTT |
| | | GGTTTTTATCGTCGTCTGGTAAACGAGGGTTATGATAGTGTTGCTCTTACTATGCCTCGTAATTCCTTT |
| | | TGGCGTTATGTATCTGCATTAGTTGAATGTGGTATTCCTAAATCTCAACTGATGAATCTTTCTACCTGT |
| | | AATAATGTTGTTCCGTTAGTTCGTTTTATTAACGTAGATTTTTCTTCCCAACGTCCTGACTGGTATAATG |
| | | AGCCAGTTCTTAAAATCGCATAAGGTAATTCACAATGATTAAAGTTGAAATTAAACCATCTCAAGCCCA |
| | | ATTTACTACTCGTTCTGGTGTTTCTCGTCAGGGCAAGCCTTATTCACTGAATGAGCAGCTTTGTTACGT |
| | | TGATTTGGGTAATGAATATCCGGTTCTTGTCAAGATTACTCTTGATGAAGGTCAGCCAGCCTATGCGC |
| | | CTGGTCTGTACACCGTTCATCTGTCCTCTTTCAAAGTTGGTCAGTTCGGTTCCCTTATGATTGACCGT |
| | | CTGCGCCTCGTTCCGGCTAAGTAACATGGAGCAGGTCGCGGATTTCGACACAATTTATCAGGCGATG |
| | | ATACAAATCTCCGTTGTACTTTGTTTCGCGCTTGGTATAATCGCTGGGGGTCAAAGATGAGTGTTTTA |
| | | GTGTATTCTTTTGCCTCTTTCGTTTTAGGTTGGTGCCTTCGTAGTGGCATTACGTATTTTACCCGTTTA |
| | | ATGGAAACTTCCTCATGAAAAAGTCTTTAGTCCTCAAAGCCTCTGTAGCCGTTGCTACCCTCGTTCCG |
| | | ATGCTGTCTTTCGCTGCTGAGGGTGACGATCCCGCAAAAGCGGCCTTTAACTCCCTGCAAGCCTCAG |
| | | CGACCGAATATATCGGTTATGCGTGGGCGATGGTTGTTGTCATTGTCGGCGCAACTATCGGTATCAA |
| | | GCTGTTTAAGAAATTCACCTCGAAAGCAAGCTGATAAACCGATACAATTAAAGGCTCCTTTTGGAGCC |
| | | TTTTTTTTGGAGATTTTCAACGTGAAAAAATTATTATTCGCAATTCCTTTAGTTGTTCCTTTCTATTCTCA |
| | | CTCCGCTGAAACTGTTGAAAGTTGTTTAGCAAAATCCCATACAGAAAATTCATTTACTAACGTCTGGAA |
| | | AGACGACAAAACTTTAGATCGTTACGCTAACTATGAGGGCTGTCTGTGGAATGCTACAGGCGTTGTAG |
| | | TTTGTACTGGTGACGAAACTCAGTGTTACGGTACATGGGTTCCTATTGGGCTTGCTATCCCTGAAAAT |
| | | GAGGGTGGTGGCTCTGAGGGTGGCGGTTCTGAGGGTGGCGGTTCTGAGGGTGGCGGTACTAAACC |
| | | TCCTGAGTACGGTGATACACCTATTCCGGGCTATACTTATATCAACCCTCTCGACGGCACTTATCCGC |
| | | CTGGTACTGAGCAAAACCCCGCTAATCCTAATCCTTCTCTTGAGGAGTCTCAGCCTCTTAATACTTTCA |
| | | TGTTTCAGAATAATAGGTTCCGAAATAGGCAGGGGGCATTAACTGTTTATACGGGCACTGTTACTCAA |
| | | GGCACTGACCCCGTTAAAACTTATTACCAGTACACTCCTGTATCATCAAAAGCCATGTATGACGCTTA |
| | | CTGGAACGGTAAATTCAGAGACTGCGCTTTCCATTCTGGCTTTAATGAGGATTTATTTGTTTGTGAATA |
| | | TCAAGGCCAATCGTCTGACCTGCCTCAACCTCCTGTCAATGCTGGCGGCGGCTCTGGTGGTGGTTCT |
| | | GGTGGCGGCTCTGAGGGTGGTGGCTCTGAGGGTGGCGGTTCTGAGGGTGGCGGCTCTGAGGGAGG |
| | | CGGTTCCGGTGGTGGCTCTGGTTCCGGTGATTTTGATTATGAAAAGATGGCAAACGCTAATAAGGGG |
| | | GCTATGACCGAAAATGCCGATGAAAACGCGCTACAGTCTGACGCTAAAGGCAAACTTGATTCTGTCG |
| | | CTACTGATTACGGTGCTGCTATCGATGGTTTCATTGGTGACGTTTCCGGCCTTGCTAATGGTAATGGT |
| | | GCTACTGGTGATTTTGCTGGCTCTAATTCCCAAATGGCTCAAGTCGGTGACGGTGATAATTCACCTTT |
| | | AATGAATAATTTCCGTCAATATTTACCTTCCCTCCCTCAATCGGTTGAATGTCGCCCTTTTGTCTTTGG |
| | | CGCTGGTAAACCATATGAATTTTCTATTGATTGTGACAAAATAAACTTATTCCGTGGTGTCTTTGCGTT |
| | | TCTTTTATATGTTGCCACCTTTATGTATGTATTTTCTACGTTTGCTAACATACTGCGTAATAAGGAGTCT |
| | | TAATCATGCCAGTTCTTTTGGGTATTCCGTTATTATTGCGTTTCCTCGGTTTCCTTCTGGTAACTTTGTT |
| | | CGGCTATCTGCTTACTTTTCTTAAAAAGGGCTTCGGTAAGATAGCTATTGCTATTTCATTGTTTCTTGC |
| | | TCTTATTATTGGGCTTAACTCAATTCTTGTGGGTTATCTCTCTGATATTAGCGCTCAATTACCCTCTGA |
| | | CTTTGTTCAGGGTGTTCAGTTAATTCTCCCGTCTAATGCGCTTCCCTGTTTTTATGTTATTCTCTCTGTA |
| | | AAGGCTGCTATTTTCATTTTTGACGTTAAACAAAAAATCGTTTCTTATTTGGATTGGGATAAATAATATG |
| | | GCTGTTTATTTTGTAACTGGCAAATTAGGCTCTGGAAAGACGCTCGTTAGCGTTGGTAAGATTCAGGA |
| | | TAAAATTGTAGCTGGGTGCAAAATAGCAACTAATCTTGATTTAAGGCTTCAAAACCTCCCGCAAGTCG |
| | | GGAGGTTCGCTAAAACGCCTCGCGTTCTTAGAATACCGGATAAGCCTTCTATATCTGATTTGCTTGCT |
| | | ATTGGGCGCGGTAATGATTCCTACGATGAAAATAAAAACGGCTTGCTTGTTCTCGATGAGTGCGGTAC |
| | | TTGGTTTAATACCCGTTCTTGGAATGATAAGGAAAGACAGCCGATTATTGATTGGTTTCTACATGCTCG |
| | | TAAATTAGGATGGGATATTATTTTTCTTGTTCAGGACTTATCTATTGTTGATAAACAGGCGCGTTCTGC |
| | | ATTAGCTGAACATGTTGTTTATTGTCGTCGTCTGGACAGAATTACTTTACCTTTTGTCGGTACTTTATAT |
| | | TCTCTTATTACTGGCTCGAAAATGCCTCTGCCTAAATTACATGTTGGCGTTGTTAAATATGGCGATTCT |
| | | CAATTAAGCCCTACTGTTGAGCGTTGGCTTTATACTGGTAAGAATTTGTATAACGCATATGATACTAAA |
| | | CAGGCTTTTTCTAGTAATTATGATTCCGGTGTTTATTCTTATTTAACGCCTTATTTATCACACGGTCGGT |
| | | ATTTCAAACCATTAAATTTAGGTCAGAAGATGAAATTAACTAAAATATATTTGAAAAAGTTTTCTCGCGT |
| | | TCTTTGTCTTGCGATTGGATTTGCATCAGCATTTACATATAGTTATATAACCCAACCTAAGCCGGAGGT |
| | | TAAAAAGGTAGTCTCTCAGACCTATGATTTTGATAAATTCACTATTGACTCTTCTCAGCGTCTTAATCTA |
| | | AGCTATCGCTATGTTTTCAAGGATTCTAAGGGAAAATTAATTAATAGCGACGATTTACAGAAGCAAGGT |
| | | TATTCACTCACATATATTGATTTATGTACTGTTTCCATTAAAAAAGGTAATTCAAATGAAATTGTTAAATG |
| | | TAATTAATTTTGTTTTCTTGATGTTTGTTTCATCATCTTCTTTTGCTCAGGTAATTGAAATGAATAATTCG |
| | | CCTCTGCGCGATTTTGTAACTTGGTATTCAAAGCAATCAGGCGAATCCGTTATTGTTTCTCCCGATGTA |
| | | AAAGGTACTGTTACTGTATATTCATCTGACGTTAAACCTGAAAATCTACGCAATTTCTTTATTTCTGTTT |
| | | TACGTGCAAATAATTTTGATATGGTAGGTTCTAACCCTTCCATTATTCAGAAGTATAATCCAAACAATCA |
| | | GGATTATATTGATGAATTGCCATCATCTGATAATCAGGAATATGATGATAATTCCGCTCCTTCTGGTGG |
| | | TTTCTTTGTTCCGCAAAATGATAATGTTACTCAAACTTTTAAAATTAATAACGTTCGGGCAAAGGATTTA |
| | | ATACGAGTTGTCGAATTGTTTGTAAAGTCTAATACTTCTAAATCCTCAAATGTATTATCTATTGACGGCT |
| | | CTAATCTATTAGTTGTTAGTGCTCCTAAAGATATTTTAGATAACCTTCCTCAATTCCTTTCAACTGTTGA |
| | | TTTGCCAACTGACCAGATATTGATTGAGGGTTTGATATTTGAGGTTCAGCAAGGTGATGCTTTAGATTT |
| | | TTCATTTGCTGCTGGCTCTCAGCGTGGCACTGTTGCAGGCGGTGTTAATACTGACCGCCTCACCTCT |
| | | GTTTTATCTTCTGCTGGTGGTTCGTTCGGTAllTTTAATGGCGATGTTTTAGGGCTATCAGTTCGCGCA |
| | | TTAAAGACTAATAGCCATTCAAAAATATTGTCTGTGCCACGTATTCTTACGCTTTCAGGTCAGAAGGGT |
| | | TCTATCTCTGTTGGCCAGAATGTCCCTTTTATTACTGGTCGTGTGACTGGTGAATCTGCCAATGTAAAT |
| | | AATCCATTTCAGACGATTGAGCGTCAAAATGTAGGTATTTCCATGAGCGTTTTTCCTGTTGCAATGGCT |
| | | GGCGGTAATATTGTTCTGGATATTACCAGCAAGGCCGATAGTTTGAGTTCTTCTACTCAGGCAAGTGA |
| | | TGTTATTACTAATCAAAGAAGTATTGCTACAACGGTTAATTTGCGTGATGGACAGACTCTTTTACTCGG |
| | | TGGCCTCACTGATTATAAAAACACTTCTCAGGATTCTGGCGTACCGTTCCTGTCTAAAATCCCTTTAAT |
| | | CGGCCTCCTGTTTAGCTCCCGCTCTGATTCTAACGAGGAAAGCACGTTATACGTGCTCGTCAAAGCA |
| | | ACCATAGTACGCGCCCTGTAGCGGCGCATTAAGCGCGGCGGGTGTGGTGGTTACGCGCAGCGTGAC |
| | | CGCTACACTTGCCAGCGCCCTAGCGCCCGCTCCTTTCGCTTTCTTCCCTTCCTTTCTCGCCACGTTCG |
| | | CCGGCTTTCCCCGTCAAGCTCTAAATCGGGGGCTCCCTTTAGGGTTCCGATTTAGTGCTTTACGGCA |
| | | CCTCGACCCCAAAAAACTTGATTTGGGTGATGGTTCACGTAGTGGGCCATCGCCC |
| | T_octa | |
| 3 to 154 | core | Core_1 to core_152 (see sequence listing) |
| 155 to 160 | side1_recess | side1_recess_1 to side1_recess_6 (see sequence listing) |
| 161 to 168 | side1_protrusion | side1_protrusion_1 to side1_protrusion_8 (see sequence |
| | | listing) |
| 169 to 174 | side2_recess | side2_recess_1 to side2_recess_6 (see sequence listing) |
| 175 to 182 | side2_protrusion | side2_protrusion_1 to side2_ protrusion _8 (see sequence |
| | | listing) |
| 183 to 188 | side3_recess | side3_recess_1 to side3_recess_6 (see sequence listing) |
| 189 to 196 | side3_protrusion | side3_protrusion_1 to side3_protrusion_8 (see sequence |
| | | listing) |
| | T = 1 | |
| 197 to 351 | core | core_1 to core_155 (see sequence listing) |
| 352 to 358 | side1_recess | side1_recess_1 to side1_recess_7 (see sequence listing) |
| 359 to 365 | side1_protrusion | side1_protrusion_1 to side1_protrusion_7 (see sequence |
| | | listing) |
| 366 to 372 | side2_recess | side2_recess_1 to side2_recess_7 (see sequence listing) |
| 373 to 379 | side2_protrusion | side2_protrusion_1 to side2_protrusion_7 (see sequence |
| | | listing) |
| 380 to 386 | side3_recess | side3_recess_1 to side3_recess_7 (see sequence listing) |
| 387 to 393 | side3_protrusion | side3_protrusion_1 to side3_protrusion_7 (see sequence |
| | | listing) |
| | T = 1 (FRET) | |
| 394 to 548 | core | core_1 to core_155 (see sequence listing) |
| 549 to 555 | side1_recess | side1_recess_1 to side1_recess_7 (see sequence listing) |
| 556 to 562 | side1_protrusion | side1_protrusion_1 to side1_protrusion_7 (see sequence |
| | | listing) |
| 563 to 569 | side2_recess | side2_recess_1 to side2_recess_7 (see sequence listing) |
| 570 to 576 | side2_protrusion | side2_protrusion_1 to side2_protrusion_7 (see sequence |
| | | listing) |
| 577 to 583 | side3_recess | side3_recess_1 to side3_recess_7 (see sequence listing) |
| 584 to 590 | side3_protrusion | side3_protrusion_1 to side3_protrusion_7 (see sequence |
| | | listing) |
| | T = 1 (-5°) | |
| 591 to 746 | core | core_1 to core_156 (see sequence listing) |
| 747 to 753 | side1_recess | side1_recess_1 to side1_recess_7 (see sequence listing) |
| 754 to 760 | side1_protrusion | side1_protrusion_1 to side1_protrusion_7 (see sequence |
| | | listing) |
| 761 to 767 | side2_recess | side2_recess_1 to side2_recess_7 (see sequence listing) |
| 768 to 774 | side2_protrusion | side2_protrusion_1 to side2_protrusion_7 (see sequence |
| | | listing) |
| 775 to 781 | side3_recess | side3_recess_1 to side3_recess_7 (see sequence listing) |
| 782 to 788 | side3_protrusion | side3_protrusion_1 to side3_protrusion_7 (see sequence |
| | | listing) |
| | T = 1 (+5°) | |
| 789 to 940 | core | core_1 to core_152 (see sequence listing) |
| 941 to 947 | side1_recess | side1_recess_1 to side1_recess_7 (see sequence listing) |
| 948 to 954 | side1_protrusion | side1_protrusion_1 to side1_protrusion_7 (see sequence |
| | | listing) |
| 955 to 961 | side2_recess | side2_recess_1 to side2_recess_7 (see sequence listing) |
| 962 to 968 | side2_protrusion | side2_protrusion_1 to side2_protrusion_7 (see sequence |
| | | listing) |
| 969 to 985 | side3_recess | side3_recess_1 to side3_recess_7 (see sequence listing) |
| 976 to 982 | side3_protrusion | side3_protrusion_1 to side3_ protrusion_7 (see sequence |
| | | listing) |
| | T = 3 | |
| 983 to 1145 | core | core_1 to core_163 (see sequence listing) |
| 1146 to | side1_protrusion | side1_protrusion_1 to side1_protrusion_8 (see sequence |
| 1153 | | listing) |
| 1154 to | side2_recess | side2_recess_1 to side2_recess_8 (see sequence listing) |
| 1161 | | |
| 1162 to | side3_recess | side3_recess_1 to side3_recess_7 (see sequence listing) |
| 1168 | | |
| 1169 to | side3_protrusion | side3_protrusion_1 to side3_ protrusion _7 (see sequence |
| 1175 | | listing) |
| | T = 4 (iso) | |
| 1176 to | core | core_1 to core 168 (see sequence listing) |
| 1343 | | |
| 1344 to | side1_protrusion | side1_protrusion 1 to sidel protrusion 8 (see sequence listing) |
| 1351 | | |
| 1352 to | side2_recess | side2_recess_1 to side2_recess_8 (see sequence listing) |
| 1359 | | |
| 1360 to | side3_protrusion | side3_protrusion_1 to side3_protrusion_8 (see sequence listing) |
| 1367 | | |
| | T = 4 (equi) | |
| 1368 to | core | core_1 to core 171 (see sequence listing) |
| 1538 | | |
| 1539 to | side1_recess | side1_recess_1 to side1_recess_7 (see sequence listing) |
| 1545 | | |
| 1546 to | side2_recess | side2_recess_1 to side2_recess_7 (see sequence listing) |
| 1552 | | |
| 1553 to | side3_recess | side3_recess_1 to side3_recess_7 (see sequence listing) |
| 1559 | | |
| | T=9 (pent) | |
| 1560 to | core | core_1 to core 146 (see sequence listing) |
| 1705 | | |
| 1706 to | side1_protrusion | side1_protrusion_1 to side1_protrusion_8 (see sequence listing) |
| 1713 | | |
| 1714 to | side2_recess | side2_recess_1 to side2_recess_8 (see sequence listing) |
| 1721 | | |
| 1722 to | side3_protrusion | side3_protrusion_1 to side3_protrusion_7 (see sequence listing) |
| 1728 | | |
| | T = 9 (hex1) | |
| 1729 to | core | core_1 to core 163 (see sequence listing) |
| 1891 | | |
| 1892 to | side1_protrusion | side1_protrusion_1 to side1_protrusion_8 (see sequence listing) |
| 1899 | | |
| 1900 to | side2_recess | side2_recess_1 to side2_recess_8 (see sequence listing) |
| 1907 | | |
| 1908 to | side3_protrusion | side3_recess_1 to side3_recess_8 (see sequence listing) |
| 1915 | | |
| | T = 9 (hex1) | |
| | broken | |
| 1916 to | core | core_1 to core 163 (see sequence listing) |
| 2078 | | |
| 2079 to | side1_protrusion | side1_protrusion_1 to side1_protrusion_8 (see sequence listing) |
| 2086 | | |
| 2087 to | side2_recess | side2_recess_1 to side2_recess_8 (see sequence listing) |
| 2094 | | |
| 2095 to | side3_protrusion | side3_recess_1 to side3_recess_8 (see sequence listing) |
| 2102 | | |
| | T = 9 (hex2) | |
| 2103 to | core | core 1 to core 164 (see sequence listing) |
| 2266 | | |
| 2267 to | side1_protrusion | side1_protrusion_1 to side1_protrusion_8 (see sequence listing) |
| 2274 | | |
| 2275 to | side2_recess | side2_recess_1 to side2_recess_8 (see sequence listing) |
| 2282 | | |
| 2283 to | side3_recess/ | side3_recess/protrusion_1 to side3_recess/protrusion_8 (see |
| 2290 | protrusion | sequence listing) |
| | T_octa (half) | |
| 2291 to | core | core_1 to core_146 (see sequence listing); core to be combined |
| 2436 | | with option A1 or A2 and option B1 or B2 |
| 2437 to | A1: antibody | AB_attach_1 to AB_attach_18 (see sequence listing); |
| 2454 | attachment | AB_attach_18 (SEQ ID NO: 2454) to be used instead of |
| | | side3_protrusion_4 (SEQ ID NO: 2496 or 2525) |
| 2455 to | A2: no antibody | no_AB_attach_1 to no_AB_attach_17 (see sequence listing) |
| 2471 | attachment | |
| 2472 to | B1: stacking | side1_protrusion_1 to side1_protrusion_7 (see sequence listing) |
| 2478 | contacts all | |
| | active: | |
| | side1_protrusion | |
| 2479 to | B1: stacking | side2_recess_1 to side2_recess_8 (see sequence listing) |
| 2486 | contacts all | |
| | active: | |
| | side2_recess | |
| 2487 to | B1: stacking | side3_recess_1 to side3 (see sequence listing) |
| 2492 | contacts all | |
| | active: | |
| | side3_recess | |
| 2493 to | B1: stacking | side3_protrusion_1 to side3_protrusion_8 (see sequence listing) |
| 2500 | contacts all | |
| | active: | |
| | side3_protrusion | |
| 2501 to | B2: stacking | side1_protrusion_1 to side1_protrusion_7 (see sequence listing) |
| 2507 | contact | |
| | passivated | |
| | with polyT: | |
| | side1_protrusion | |
| 2508 to | B2: stacking | side2_recess_1 to side2_recess_8 (see sequence listing) |
| 2515 | contact | |
| | passivated | |
| | with polyT: | |
| | side2_recess | |
| 2516 to | B2: stacking | side3_recess_1 to side3_recess_6 (see sequence listing) |
| 2521 | contact | |
| | passivated | |
| | with polyT: | |
| | side3_recess | |
| 2522 to | B2: stacking | side3_protrusion_1 to side3 (see sequence listing) |
| 2529 | contact | |
| | passivated | |
| | with polyT: | |
| | side3_protrusion | |
| | T_pent T = 1 (2 | |
| | or 3 triangles) | |
| 2530 to | core | core_1 to core_162 (see sequence listing); core to be combined |
| 2691 | | with option A1 or A2 and option B1, B2 or B3 |
| 2692 to | A1: antibody | AB_attach_1 to AB_attach_11 (see sequence listing) |
| 2702 | attachment | |
| 2703 to | A2: no antibody | no_AB attach_1 to no_AB_attach_11 (see sequence listing) |
| 2713 | attachment | |
| 2714 to | B1: stacking | side1_protrusion_2 to side1_protrusion_8 (see sequence listing) |
| 2720 | contacts all | |
| | active: | |
| | side1_protrusion | |
| 2721 to | B1: stacking | side2_recess_1 to side2_recess_8 (see sequence listing) |
| 2728 | contacts all | |
| | active: | |
| | side2_recess | |
| 2729 to | B1: stacking | side3_recess_1 to side3_recess_7 (see sequence listing) |
| 2735 | contacts all | |
| | active: | |
| | side3_recess | |
| 2736 to | B2: stacking | side1_protrusion_2 to side1_protrusion_8 (see sequence listing) |
| 2742 | contact | |
| | passivated with | |
| | polyT; or B3: | |
| | stacking contact | |
| | with sticky | |
| | overhangs for | |
| | T_ring_T = 1 (2 | |
| | triangles): | |
| | side1_protrusion | |
| 2743 to | B2: stacking | side2_recess_1 to side2_recess_8 (see sequence listing) |
| 2750 | contact | |
| | passivated with | |
| | polyT; or B3: | |
| | stacking | |
| | contact with | |
| | sticky overhangs | |
| | for T_ring_T = 1 | |
| | (2 triangles): | |
| | side2_recess | |
| 2751 to | B2: stacking | side3_recess_1 to side3_recess_7 (see sequence listing) |
| 2757 | contact | |
| | passivated | |
| | with polyT: | |
| | side3_recess | |
| 2758 to | B3: stacking | side3_recess_1 to side3_recess_8 (see sequence listing); |
| 2765 | contact | side3_recess_5 (SEQ ID NO: 2762), side3_recess_7 (SEQ ID |
| | with sticky | NO: 2764) and side3_recess_8 (SEQ ID NO: 2765) to be used |
| | overhangs | instead of core_129 (SEQ ID NO: 2658) and core_142 (SEQ ID |
| | for T_ring_T = 1 | NO: 2671) |
| | (2 triangles): | |
| | side3_recess | |
| | T_ring T = 1 | |
| | (2 triangles) | |
| 2766 to | core | core_1 to core_149 (see sequence listing); core to be combined |
| 2914 | | with option A1 or A2 and option B1, B2 or B3 |
| 2915 to | A1: antibody | AB_attach_1 to AB_attach_15 (see sequence listing) |
| 2929 | attachment | |
| 2930 to | A2: no antibody | no_AB_attach_1 to no_AB_attach_14 (see sequence listing) (plus |
| 2943 | attachment | AB_attach_15) |
| 2944 to | B1: stacking | side1_recess_1 to side1_recess_7 (see sequence listing) |
| 2950 | contacts all | |
| | active: | |
| | side1_recess | |
| 2951 to | B1: stacking | side1_protrusion_1 to side1_protrusion_7 (see sequence listing) |
| 2957 | contacts all | |
| | active: | |
| | side1_protrusion | |
| 2958 to | B1: stacking | side2_recess_1 to side2_recess_7 (see sequence listing) |
| 2964 | contacts all | |
| | active: | |
| | side2_recess | |
| 2965 to | B1: stacking | side2_protrusion_1 to side2_protrusion_7 (see sequence listing) |
| 2971 | contacts all | |
| | active: | |
| | side2_protrusion | |
| 2972 to | B1: stacking | side3_protrusion_1 to side3_protrusion_8 (see sequence listing) |
| 2979 | contacts all | |
| | active: | |
| | side3_protrusion | |
| 2980 to | B2: stacking | side1_recess_1 to side1_recess_7 (see sequence listing) |
| 2986 | contact | |
| | passivated with | |
| | polyT; or B3: | |
| | stacking | |
| | contact with 3 | |
| | bases removed | |
| | for T_pent | |
| | T = 1 (2 or | |
| | 3 triangles): | |
| | side1_recess | |
| 2987 to | B2: stacking | side1_protrusion_1 to side1_protrusion_7 (see sequence listing) |
| 2993 | contact | |
| | passivated with | |
| | polyT; or B3: | |
| | stacking | |
| | contact with 3 | |
| | bases removed | |
| | for T_pent | |
| | T = 1 (2 or | |
| | 3 triangles): | |
| | side1_protrusion | |
| 2994 to | B2: stacking | side2_recess_1 to side2_recess_7 (see sequence listing) |
| 3000 | contact | |
| | passivated with | |
| | polyT; or B3: | |
| | stacking | |
| | contact with 3 | |
| | bases removed | |
| | for T_pent | |
| | T = 1 (2 or | |
| | 3 triangles): | |
| | side2_recess | |
| 3001 to | B2: stacking | side2_protrusion_1 to side2_protrusion_7 (see sequence listing) |
| 3007 | contact | |
| | passivated with | |
| | polyT; or B3: | |
| | stacking | |
| | contact with 3 | |
| | bases removed | |
| | for T_pent | |
| | T = 1 (2 or | |
| | 3 triangles): | |
| | side2_protrusion | |
| 3008 to | B2: stacking | side3_protrusion_1 to side3_protrusion_8 (see sequence listing) |
| 3015 | contact | |
| | passivated with | |
| | polyT: | |
| | side3_protrusion | |
| 3016 to | B3: stacking | side3_protrusion_1 to side3_protrusion_8 (see sequence listing) |
| 3023 | contact with | |
| | 3 bases removed | |
| | for T_pent | |
| | T = 1 (2 or 3 | |
| | triangles): | |
| | side3_protrusion | |
| | T_ring1 T = 1 | |
| | (3 triangles) | |
| 3024 to | core | core_1 to core_167 (see sequence listing); core to be combined |
| 3190 | | with option A1 or A2 and option B1 or B2 |
| 3191 to | A1: antibody | AB_attach_1 to AB_attach_9 (see sequence listing) |
| 3199 | attachment | |
| 3200 to | A2: no antibody | no_AB_attach_1 to no_AB_attach_9 (see sequence listing) |
| 3208 | attachment | |
| 3209 to | B1: stacking | side1_protrusion_1 to side1_protrusion_7 (see sequence listing) |
| 3215 | contacts all | |
| | active: | |
| | side1_protrusion | |
| 3216 to | B1: stacking | side2_recess_1 to side2_recess_8 (see sequence listing) |
| 3223 | contacts all | |
| | active: | |
| | side2_recess | |
| 3224 to | B1: stacking | side3_protrusion_1 to side3_protrusion_8 (see sequence listing) |
| 3231 | contacts all | |
| | active: | |
| | side3_protrusion | |
| 3232 to | B2: stacking | side1_protrusion_1 to side1_protrusion_7 (see sequence listing) |
| 3238 | contact | |
| | passivated | |
| | with polyT: | |
| | side1_protrusion | |
| 3239 to | B2: stacking | side2_recess_1 to side2_recess_8 (see sequence listing) |
| 3246 | contact | |
| | passivated | |
| | with polyT: | |
| | side2_recess | |
| 3247 to | B2: stacking | side3_protrusion_1 to side3_protrusion_8 (see sequence listing) |
| 3254 | contact | |
| | passivated | |
| | with polyT: | |
| | side3_protrusion | |
| | T_ring2 T = 1 | |
| | (3 triangles) | |
| 3255 to | core | core_1 to core_167 (see sequence listing); core to be combined |
| 3421 | | with option A1 or A2 and option B1 or B2 |
| 3422 to | A1: antibody | AB_attach_1 to AB_attach_8 (see sequence listing) |
| 3429 | attachment | |
| 3430 to | A2: no antibody | no_AB_attach_1 to no_AB_attach_8 (see sequence listing) |
| 3437 | attachment | |
| 3438 to | B1: stacking | side1_recess_1 to side1_recess_8 (see sequence listing) |
| 3446 | contacts | |
| | all active: | |
| | side1_recess | |
| 3447 to | B1: stacking | side2_protrusion_1 to side2_protrusion_8 (see sequence listing) |
| 3454 | contacts all | |
| | active: | |
| | side2_protrusion | |
| 3455 to | B1: stacking | side3_protrusion_1 to side3_protrusion_8 (see sequence listing) |
| 3462 | contacts all | |
| | active: | |
| | side3_protrusion | |
| 3463 to | B2: stacking | side1_recess_1 to side1_recess_8 (see sequence listing) |
| 3470 | contact | |
| | passivated | |
| | with polyT: | |
| | side1_recess | |
| 3471 to | B2: stacking | side2_protrusion_1 to side2_protrusion_8 (see sequence listing) |
| 3478 | contact | |
| | passivated | |
| | with polyT: | |
| | side2_protrusion | |
| 3479 to | B2: stacking | side3_protrusion_1 to side3_protrusion_8 (see sequence listing) |
| 3486 | contact | |
| | passivated | |
| | with polyT: | |
| | side3_protrusion | |
| | triangular brick | |
| 3487 to | Tail core | core_1 to core_144 (see sequence listing) |
| 3630 | | |
| 3631 to | PolyT back | back_1 to back_33 (see sequence listing) |
| 3663 | | |
| 3664 to | 3T PolyT front | front_1 to front_21 (see sequence listing) |
| 3684 | | |
| 3685 to | attach PolyT f | tailstick_1 to tailstick_12 (see sequence listing) |
| 3696 | TailStick | |
| | T = 1 for | |
| | triangular brick | |
| 3697 to | core side 1 | core_1 to core_58 (see sequence listing) |
| 3754 | | |
| 3755 to | core side 2 | core_1 to core_58 (see sequence listing) |
| 3812 | | |
| 3813 to | core side 3 | core_1 to core_58 (see sequence listing) |
| 3870 | | |
| 3871 to | attach core T1 | sticky_1 to sticky_18 (see sequence listing) |
| 3888 | sticky | |
| 3689 to | 3T connect side1 | side1_I1_h51; side1_I2_h45; side1_O1_h13; side1_O2_h18 (see |
| 3892 | | sequence listing) |
| 3893 to | 3T connect side2 | side2_I1_h43; side2_I2_h37; side2_O1_h25; side2_O2_h30 (see |
| 3896 | | sequence listing) |
| 3897 to | 3T connect side3 | side3_I1_h59; side3_I2_h53; side3_O1_h1; side3_O2_h6 (see |
| 3900 | | sequence listing) |
| | octahedron for in | |
| | vitro condition | |
| 3901 to | core | core_1 to core_128 (see sequence listing) |
| 4028 | | |
| 4029 to | hubble S1 | S1_1 to S1_8 (see sequence listing) |
| 4036 | | |
| 4037 to | hubble S2 | S2_1 to S2_8 (see sequence listing) |
| 4044 | | |
| 4045 to | hubble S3 | S3_1 to S3_8 (see sequence listing) |
| 4052 | | |
| 4053 to | hole S1 | S1_1 to S1_6 (see sequence listing) |
| 4058 | | |
| 4059 to | hole S2 | S2_1 to S2_6 (see sequence listing) |
| 4064 | | |
| 4065 to | hole S3 | S3_1 to S3_6 (see sequence listing) |
| 4070 | | |
| 4071 to | as feature | feature_1 to feature_3 (see sequence listing) |
| 4073 | | |
| 4074 to | hd h11 1 | S1 to S3; S1_buddy to S3_buddy (see sequence listing) |
| 4079 | | |
| 4080 to | hd h11 2 | S1_buddy to S3_buddy (see sequence listing) |
| 4083 | | |
| 4083 to | hd h12 | S1 to S3; S1_buddy to S3_buddy (see sequence listing) |
| 4088 | | |
| 4089 to | hd h22 | S1 to S3; S1_buddy to S3_buddy (see sequence listing) |
| 4094 | | |

[0144] It is appreciated that certain features of the invention, which are, for clarity, described in the context of separate embodiments, may also be provided in combination in a single embodiment. Conversely, various features of the invention, which are, for brevity, described in the context of a single embodiment, may also be provided separately or in any suitable sub-combination. All combinations of the embodiments pertaining to the invention are specifically embraced by the present invention and are disclosed herein just as if each and every combination was individually and explicitly disclosed. In addition, all sub-combinations of the various embodiments and elements thereof are also specifically embraced by the present invention and are disclosed herein just as if each and every such sub-combination was individually and explicitly disclosed herein.

[0145] The present invention is not to be limited in scope by the specific embodiments described herein. Indeed, various modifications of the invention in addition to those described herein will become apparent to those skilled in the art from the foregoing description. Such modifications are intended to fall within the scope of the appended claims.

[0146] To the extent possible under the respective patent law, all patents, applications, publications, test methods, literature, and other materials cited herein are hereby incorporated by reference.

[0147] The following Examples illustrates the invention described above, but is not, however, intended to limit the scope of the invention in any way. Other test models known as such to the person skilled in the pertinent art can also determine the beneficial effects of the claimed invention.

### EXAMPLES

### Introduction

[0148] We report the successful design of a suite of molecular building blocks inspired by nature that self-assemble into a wide family of virus-sized icosahedral shells. The blocks, constructed from DNA origami, are designed according to symmetry principles that dictate the minimal number of distinct bonds per icosahedral shell, and have programmable lock-and-key interaction patterns and strengths. These programmable shells could provide a novel route to virus deactivation, premised on the concept of trapping whole viruses in pre-designed macromolecular shells for effectively blocking molecular interactions between virus and host cells. The shells form robustly, with few defects and at high yields, as we validated by cryo electron microscopy and electrophoretic mobility shift assays. We used hepatitis B virus core particles to demonstrate the feasibility of our virus-trapping and interaction-blocking concept. Realizing the promise of our novel methods for fighting viral infections holds potential for reducing disease, health care costs, and lowering economic burden caused by currently untreatable viral diseases. In addition, our methods hold particular potential for treating emerging and as-yet undescribed viruses, because our method is not dependent on any particular viral structure or host-virus interaction. We show examples for further expanding the functionality of the shells to create “smart” antigen-responsive agents. In addition to antiviral agents, potential applications of these shells include building compartmentalized systems to use as antigen-carriers for vaccination, drug delivery vehicles, protective storage containers and synthetic organelles.

[0149] To develop our antiviral concept we considered how the mammalian immune defense can protect us against invading viral pathogens. On the one hand, neutralizing antibodies can emerge that bind to specific antigens on viruses and then can block infection, for example by inhibiting interactions of the virus with a host-cell receptor, or by binding to a viral capsid in order to inhibit uncoating of the genome. Unfortunately, most of the antibodies developed in our body in response to a pathogen do not have neutralizing activity. In addition, it takes time for the host to produce effective neutralizing antibodies. During this period the virus is replicating unchecked and can spread or even establish persistence and may be transmitted to other individuals. Some viral invaders have even evolved mechanisms to escape antibody neutralization. For example, HIV shields sensitive surface regions by flexible protein chains, and HCV engulfs itself into lipids (7, 8).

[0150] Antibodies are much smaller than viruses and generally only cover small patches on the surface of the virus per antibody. On the other hand, mammalian cells also produce interferons and (retro-)viral restriction factors that can inhibit invading viruses, as exemplified by the natural restriction factor TRIM5α, which assembles into a hexagonal shell surrounding entire HIV-1 retroviral capsids (9, 10). The TRIM5α example shows that virus encapsulation in principle could be an effective therapeutic strategy, but the natural TRIM5α lattice is highly specific and cannot be readily modified and adapted to different viruses.

[0151] Our route to virus deactivation is premised on re-creating and integrating synthetically the functional aspects of neutralizing antibodies and those of lattice-forming natural restriction factors such as TRIM5α. We envision trapping the viruses within de novo designed macromolecular shells to cover large areas of viral surfaces to effectively block molecular interactions between virus and host cells. We envision shells whose interiors allow modular, highly multivalent attachment of virus-recognizing moieties in virus-commensurate symmetries. The same type of shell “platform” could then be used modularly to target a variety of viruses. Because affinity increases exponentially with number of bonds formed (11), the multivalent attachment allows exploiting avidity to effectively trap viruses in shells functionalized with individually weakly virus-binding molecules. As virus binding molecules to be attached we envision antibodies, antibody fragments or aptamers, all of which can be made in principle without detailed knowledge about the target virus, and none of which need to have any a priori virus-neutralizing function. This is because in our concept the shell material, rather than the moieties directly contacting the virus, will prevent access to viral surfaces. Hence, with our concept any virus binder, including non-neutralizing antibodies, weakly binding aptamers, or other molecules such as heparin that binds a broad variety of different virus classes (12), can be utilized as an interior coating on the shell to create an effective antiviral agent.

[0152] Here, we report design principles for creating thick and robust macromolecular shells with user-defined sizes that are capable of accommodating entire viruses. We accomplished the construction of such artificial virus-sized macromolecular shells with high structural quality and high production yield. We have further modified our designs to build defined partial shells that feature openings for engulfing target viruses. We used hepatitis B virus (HBV) core particles to demonstrate the feasibility of our virus-trapping and interaction-blocking concept. This paper also describes routes for further expanding the functionality of the shells to create “smarter” antigen-responsive agents.

[0153] Briefly, construction of our macromolecular shells relies on several theoretical concepts. First, self-assembly of molecular complexes, such as virus capsids, proceeds typically without external guidance or energy input. Therefore, all information about the desired target shell must be encoded by the shape of the shell subunits and by the local interactions between them (13). Protein designers have previously succeeded in creating artificial macromolecular cages (14-17) by combining and modifying natural non-viral protein scaffolds that display suitable oligomerization symmetries. However, these artificially designed protein-cages are much smaller than the vast majority of natural viruses and cannot be easily modified, and thus are not suitable for our purposes. DNA nanoengineers previously created a variety of polyhedral structures based on DNA origami methods by first building vertices, programmed to assemble into different wireframe polyhedra by varying the vertex angle (18). Yields were low, however, because flexibility of the vertices limited specificity for the target structure. Subsequently, we built blocks which we sequentially assembled into more rigid vertices and larger higher-order wireframe polyhedra (19). While the yields for the blocks and the resulting polyhedra were now higher, the sequential stepwise assembly was tedious and the resulting wireframe polyhedra were still far too skeletal-like, that is too full of holes to be effective for covering the surfaces of viruses. In this work, we have finally succeeded building artificial DNA-based shells that demonstrate exquisite controllability, virus-commensurate sizes and symmetries, and high yield of assembly, thus providing a powerful platform to interface with large natural macromolecular assemblies such as viruses.

### Example 1: Shell Design Principles

[0154] Caspar and Klug elucidated the geometric principles that govern the structure of natural viral capsids in 1962 (20) by mapping a 2D triangulated net of protein positions to a 3D surface with positive curvature, through systematic replacement of 12 six-fold vertices with five-fold vertices. According to Casper and Klug theory-which has been expanded recently (21)—the number of distinct environments occupied by proteins within an icosahedral capsid is described by its triangulation number (T-number), which can be computed by a triangular net projection of the arrangement of pentamers and hexamers within an icosahedral capsid (T=h2+hk+k2, FIG. 1A). The total number of proteins required to build a natural capsid is T times sixty. This is because natural protein subunits are, by default, asymmetric and homo-trimerization is minimally required to construct a three-fold symmetric subunit that can assemble into an icosahedral shell with twenty triangular faces (FIG. 1B, left: T=1 minute virus of mice (22)). To build larger capsids for accommodating a larger genome, viruses use more than one capsid protein or capsid proteins that can adopt different conformations. For example, the cowpea chlorotic mottle virus capsid (23) assembles from a total of 180 identical-sequence proteins into a T=3 capsid in which the protein occurs in three different conformations (FIG. 1B, right).

[0155] To accommodate the required local symmetries for icosahedral shells, we created rigid pseudo-symmetric triangular subunits (FIG. 1C, left) using the methods of DNA origami (24-29). DNA origami is a biomolecular design method that can create megadalton-scale discrete objects with structurally well-defined 3D shapes (30, 31). The resulting objects can be assembled via hybridization into higher-order polyhedra (18), and into lattices (32-35). Our subunits are designed to self-assemble into higher-order objects through lateral edge-to-edge interactions using base pair stacking (36) instead of hybridization, thereby mimicking lock-and-key interactions in proteins. The lateral edge-to-edge base pair stacking interactions can be modularly activated and de-activated, a capability we exploited for constructing partial shells. Every side of the triangular subunits we created is the equivalent of one protein subunit of a natural capsid. The overall shell shape is controlled by geometric instructions provided by the triangular subunits. These instructions are given by the choice of the particular length of each triangular edge, by a unique topological pattern per edge for controlling the pairwise edge-to-edge interactions within a set of different triangle units, and by a particular choice of the bevel angle of the edges, which will control the effective curvature of the shell. We realized the target bevel angles by tuning the helical connectivity of the triangle edges in the vertices (FIG. 5), which required deviating substantially from default multi-layer DNA origami connectivity rules. We used iterative design with caDNAno (37) paired with elastic-network-guided molecular dynamics simulations (38) to produce candidate design solutions that fulfilled desired geometrical specifications (FIG. 1C).

[0156] Since in our system each triangular edge represents one protein, the Casper and Klug triangulation number now gives the number of unique triangular edges required to build a particular shell. Hence, T=1 and T=3 shells may both be built with a single triangle, with three identical edges for T=1 (FIG. 1D, right) and three different edges for a T=3 shell (FIG. 1E, left). A T=4 shell requires two separate triangular subunits, for example, one triangle with three unique edges and another with three identical edges (FIG. 1E, middle). A T=9 shell requires three different triangles, each having three unique edges (FIG. 1E, right). The greater the T number, the greater the overall number of triangles per target shell, given by 20T. We used design solutions in which all triangle bevel angles for a particular target shell were the same. While T=9 was the largest shell we set out to build, we also designed triangular subunits for a smaller octahedral container (“O”) (FIG. 1D, left).

### Example 2: Subunit and Shell Structures

[0157] We encoded different triangle designs in DNA sequences (see methods below), produced the corresponding sets of oligonucleotides, and self-assembled the triangle variants in one-pot mixtures according to previously described procedures (39). Gel-electrophoretic folding quality analysis demanded some design iterations to improve triangular subunit assembly yields (FIG. 5). To validate the 3D structures of the designed triangles, we studied all triangle subunits using cryo transmission electron microscopy (cryo-EM) single particle analysis (FIG. 2). The resulting 3D electron maps had resolutions ranging from 13 to 22 Angstroms (FIGS. 6-13), which allowed us to evaluate the overall 3D shapes, the bevel angles, the correct positioning of all helices, the correct shape of the designed lateral protrusions and recesses for edge-to-edge docking, and the occurrence of systematic folding defects. For instance, one of the triangles for the T=9 shell (Thex1) had a systematic structural defect at one of its vertices which decreased its ability to form lateral edge-to-edge interactions (FIG. 14). Based on the cryo-EM data, we refined the design and eliminated the defect.

[0158] We then successfully assembled the iteratively improved triangle variants into closed shells having expected dimensions, as confirmed by direct imaging with cryo-EM (FIG. 2A, see FIGS. 15-19 for additional images). Inspection of individual particles (FIG. 2A) and of 2D class averages (FIG. 2B-F) revealed particles displaying the designed symmetries. For example, the three symmetry axes of the octahedron (4-fold, 3-fold, 2-fold, FIG. 2B) and T=1 shell (5-fold, 3-fold, 2-fold, FIG. 2C) can be clearly seen. The particles of the higher-T-number shells had a more circular appearance due to the higher number of triangles per particles, and the underlying triangular net predicted from the Caspar-and-Klug representation became clearly visible (FIG. 2D-F). Since the individual particles displayed the designed symmetry, we reconstructed 3D maps of the shells by imposing the respective symmetry (FIG. 2B-E). The resulting maps had resolutions ranging from 20 to 40 Angstrom. The resolutions of the octahedron and T=1 shell maps were sufficient to discern individual DNA double helices. For the T=1 shell we also computed a 3D map without imposing any a priori symmetry, and this map was fully icosahedral and superimposed well with the sibling that we reconstructed with imposed symmetry, albeit at less resolution. This work successfully proved the concept of icosahedral symmetry (FIG. 16E).

[0159] To elucidate effects of orientational specificity of subunit-subunit interactions, we varied the bevel angle of the T=1 subunits from the ideal geometry)(α=20.9°). We designed two additional variants of the T=1 triangle whose bevel angles deviated by +5° or −5° from the icosahedral ideal. The decrease or increase of the bevel angle caused the appearance of larger shell-like structures in addition to T=1 shells or octahedra, respectively (FIG. 20). Based on these data we conclude that the correct target bevel angle must be matched within a range of +−5°.

[0160] We also successfully constructed octahedron cryo EM maps with and without imposed symmetry (FIG. 15E). Shell maps that lacked one or multiple triangles were reconstructed separately (FIGS. 15D, 16D), allowing for quantitative assessment of target quality and yield, and also displayed the designed overall symmetry. We examined the largest T=9 shells with negative stain EM tomography (FIG. 2F, FIG. 21E). Sections through tomograms of assembled T=9 shells show fully closed shells as well as the correct arrangement of pentamers according to the designed T-number (arrows in FIG. 2F and FIG. 21E). The set of shells shown have internal cavities ranging from ˜50 nm to ˜280 nm. This size range corresponds to the dimensions of many viral pathogens.

### Example 3: Shell Yield and Stability

[0161] Low-density gel electrophoretic mobility analysis (FIG. 3A, FIG. 22) revealed that shell assembly proceeded by disappearance of the triangular monomers, appearance of a smear indicating the presence of oligomeric species, followed by emergence of a dominant high intensity band, which in all cases corresponded to the fully formed shell. Octahedron and T=1 shells formed within 15 and 60 minutes, respectively, which is sufficiently fast to enable self-assembly of these shells directly during the one-pot triangle-folding reaction (FIG. 24). Octahedra formed with a final complete shell yield of ˜95%. The T=1 shells formed with up to 70% yield. The T=3 and T=4 shells formed with about 40% yield (FIG. 3A). Overall, with molecular masses ranging from 43 to 925 Megadaltons (8 to 180 triangle subunits, depending on the design), our shell assemblies were not only substantially larger than any other previously reported one-pot-assembled artificial macromolecular assembly with defined size, but our shells also formed with orders-of-magnitude improved yields compared to previously built nucleic acid polyhedra (18, 19).

[0162] Subunit-exchange experiments with fluorescently labeled subunits revealed that under shell-favoring conditions triangles that are incorporated in closed shells do not exchange with solution (FIG. 3B, FIG. 23A,B). Under equilibrium conditions (FIG. 3B, FIG. 23C), triangles do exchange. For the intended application, shells should be stable without subunit turnover in physiological fluids, which we achieved through post-assembly stabilization. For example, we first assembled shells at high ionic strength conditions where the base pair stacking is effective, followed by covalent photo-crosslinking of the edge-to-edge stacking contacts using strategically placed cyanovinylcarbazole (CNVK) moieties located on the triangle subunit edges, which form covalent inter-triangle crosslinks upon illumination with 365 nm light (FIG. 3C) (40). Gel-electrophoretic mobility analysis of UV-illuminated and CNVK modified shells revealed that non-illuminated shells fell apart under the low-salt electrophoresis conditions, whereas illuminated shells remained stable, thus confirming the covalent inter-triangle bonding (FIG. 3C). In order to move to physiological conditions, we also successfully tested stabilizing the shell triangle subunits with internal covalent bonds via UV point welding as previously described (41). Additionally coating the shells with a mixture of oligolysine and PEG oligolysine (42) allowed us to transfer the shells into mouse serum, where the shells remained intact (FIG. 3D).

### Example 4: Trapping and Neutralizing Viruses

[0163] We envision multiple strategies for using our shell system to block viral surfaces from potential virus-cell interactions. One strategy consists in self-assembling protective shells from triangular building blocks on the surface of viruses. A second strategy is to coordinate and engulf a single virus by two opposing half-shells, while the virus is in the middle. A third strategy consists in swallowing viruses within pre-made shells featuring sufficiently large entry portals, similar to how a pitcher plant captures its prey. We demonstrate the latter two strategies. To accomplish this task, we designed new variants of the triangle subunits to steer self-assembly toward forming user-defined shell fragments, including half octahedron (FIG. 4A), half T=1 shells (FIG. 4B), and “trap” T=1 shells with a missing pentagon vertex (FIG. 4C). In order to prepare half instead of complete octahedron, we deactivated the base-pair stacking contacts on one of the triangular edges of the corresponding subunit by either strand shortening or by adding unpaired thymidines (FIG. 4A, see FIG. 24A,D). To create half T=1 shells, two triangular subunits are required, one that forms a closed pentamer, and another that docks onto the edges of the pentamer (FIG. 4B, see FIG. 24B,E). To build the T=1 shell variant with a missing pentagon vertex, three triangular subunit variants are required (FIG. 4C, see FIG. 24C,F). The modified shells self-assembled successfully from the triangular building blocks, as validated by cryo EM solution structures (FIG. 4D-F, see FIGS. 25-27). The resulting 2D class-averages and the 3D electron density maps revealed the expected structural features. We note that we already included nine sites per triangular edge for anchoring virus binding moieties onto the modified shell subunits, which manifested as “spikes” in the cryo EM maps (FIG. 4D,E, arrows).

[0164] To demonstrate the virus trapping capability, we trapped hepatitis B virus core particles (FIG. 4G) within each of the above described shell variants. To confer specificity, we conjugated anti-HBc 17H7 (Isotype IgG-2b) antibodies that bind and recognize the particulate viral capsid to the shell interior by hybridization of ssDNA-labeled antibodies to a set of anchor points on the triangle subunits, which we predicted would render the interior of the shells sticky specifically for the target virus. Indeed, when we incubated HBV core particles with the thus-prepared DNA shells in approximately 1:1 stoichiometry, all free virus particles were effectively taken up by our shell particles, as seen by negative-staining TEM imaging (FIG. 28). We did not observe any HBV binding in the absence of HBV antibodies conjugated to the shell interior (FIG. 29A), nor in the presence of antibodies specific for other targets (FIG. 29B). We performed cryo electron microscopy to convince ourselves of the proper capture of the target virus in our shells and reconstructed 3D maps of octahedral and T=1 shells with trapped HBV core particles (FIG. 4H,I, see FIGS. 30, 31). These maps in our opinion beautifully demonstrate the feasibility of our proposed virus-trapping system.

[0165] For the half-octahedral variant, the majority of particles consisted of two half octahedra coordinating a single HBV core particle (FIG. 4H). We observe the two half-octahedral shells in a variety of relative conformations on the shared HBV core particle (FIG. 30). The cryo-EM map also reveals signatures of the antibodies that connect the DNA shell to the trapped HBV core particle (FIG. 4H, left). Similar antibody signatures may be found in the map with the half-T=1 shell-HBV complex (FIG. 41, left), albeit at higher density threshold. We did not reconstruct a cryo-EM map of HBV core particles trapped in the T=1 shells missing a pentagon vertex, because the HBV core particle positions varied too much. Instead, negative-stain TEM images demonstrate the capability of these “pitcher-plant”-like shell variants to swallow even more than one HBV core particle (FIG. 4J, see FIG. 28E,F).

[0166] Finally, as a proof-of-concept of the virus surface interaction-inhibiting capacity of our shells, we performed in vitro virus blocking assays with HBV-binding antibodies immobilized on a solid phase mimicking a cell surface (FIG. 4K, FIG. 32). We evaluated the extent of HBV core particle binding to the solid phase via binding of an orthogonal HBV core-specific reporter antibody coupled to horseradish peroxidase (HRP). As in conventional enzyme-linked immunosorbent assays, residual HBV core particles that are bound to the surface and that are accessible for binding will be detected via HRP catalyzed production of a colorimetric signal. In the presence of our virus-engulfing shells (half T=1 shells), virus interactions with the solid phase were blocked up to 99%, thus confirming strong binding of the shell to the HBV core and the desired interaction-inhibiting capacity of our shells. Controls of shells without HBV trapping antibody (anti-HBc 17H7), and HBV core particles directly incubated with the trapping antibody (anti-HBc 17H7) without shells all resulted in minimal virus blocking compared to the signal generated by naked HBV core particles that represent 0% virus blocking. Notably, with as few as 4 capture antibodies per shell a virus blocking efficiency of >80% is achieved, demonstrating the potency of our shells to shield the virus from its exterior by steric occlusion.

### Example 5: Expanding Shell Functionality

[0167] Our current shell variants add a ˜15 nm thick DNA layer around a trapped virus particle (not counting the internal spacing created by the layer of virus-binders), and it is hard to imagine how cell-virus interactions could still take place through such thick envelopes. However, our current designs do feature several apertures, notably the cavities in the triangular subunits, which may permit residual interactions. As a demonstration for a route toward sealing the cavities in the triangular subunits we built a DNA brick having a triangular cross-section roughly corresponding to the dimensions of the triangular cavity in the shell subunits. We anchored the brick via multiple attachment points to the outer surface of a T=1 shell triangle (FIG. 33 for design details, see FIG. 34 for a cryo-EM solution structure of the brick) and partially plugged it into the cavities in the shell subunits. The brick may also act as a spacer that further separates cell surfaces from those of viruses trapped in shells by another 40 nm. The brick can be added to already assembled shells or, alternatively, the triangles and brick units can also first be dimerized, followed by triggering shell assembly. Both routes yield fully assembled “spiky” T=1 shells under the same conditions as for the unmodified T=1 shell. We solved a structure of the spiky T=1 shell using cryo-EM single particle analysis (FIG. 5A, FIG. 35). The resulting map readily overlaps with those of the unmodified T=1 shell, but the central opening of the triangle shell subunits is now blocked by the added channel module (FIG. 35E). The fact that the cavity-plugging with the DNA brick readily worked demonstrates the robustness and structural modularity of our shells. The brick may also be considered as a mimic for previously described DNA-based membrane channels (43) or for any other functional module that one wishes to attach to a shell.

[0168] In our virus-trapping experiments (FIG. 4) we mounted up to nine antibodies per triangle; that is, a half T=1 shell could potentially feature 90 virus-binding moieties. While it would be possible to create even more attachment sites, 90 is already a very high number. Some of these sites could also be used to mount additional virus-binding moieties to enhance specificity, or for attaching molecules with proteolytic activity such as trypsin or proteinase K, which could endow our shells with additional virucidal activity by shaving off surface proteins of trapped viruses.

### Example 6: Virus Trapping

[0169] Viruses can be trapped in, or coordinated by, pre-assembled icosahedral shell segments featuring sufficiently large apertures (FIG. 45a,b, FIG. 28). Alternatively, protective shells can be formed directly on the surface of virus particles (FIG. 45c). Both approaches are illustrated in experiments we performed with hepatitis B virus core particles (HBV) (FIG. 45a-c inset, red). To confer specificity to HBV, we conjugated anti-HBc 17H7 (Isotype IgG-2b) to the DNA shells by hybridization of ssDNA-labeled antibodies to a set of anchor points on the triangle subunits (FIG. 45a-c inset, cyan). We did not observe any HBV binding in the absence of HBV antibodies (FIG. 29), nor in the presence of antibodies specific for other targets (FIG. 29).

[0170] We determined 3D cryo EM maps of octahedral and T=1 half 203 shells with trapped HBV core particles (FIG. 45d, e, FIG. 30-31). For the half-octahedral variant, the majority of particles consisted of two opposing half octahedra coordinating a single HBV core particle in their middle (FIG. 45d, FIG. 30). The micrographs and the cryo EM map also reveal signatures reflecting the antibodies that link the DNA shell to the trapped HBV core particle (FIG. 45d, right). Similar antibody signatures may be found in the image data with the half T=1 shell-HBV complex (FIG. 45e, right). We also trapped HBV core particles in larger T=1 shell variants with a missing pentagon vertex (FIG. 45f) which can accommodate multiple HBV particles in their interior cavities (FIG. 45f, FIG. 28).

[0171] To test the capacity of our shells to prevent a trapped virus to undergo interactions with surfaces, we performed in vitro virus blocking assays with HBV-binding antibodies immobilized on a solid surface (FIG. 45g, FIG. 32). We quantified the extent of HBV core particle binding to the surface via binding of an orthogonal HBV core-specific reporter antibody coupled to horseradish peroxidase (HRP).

[0172] Residual HBV core particles that are bound to the surface are detected via HRP catalyzed production of a colorimetric signal.

[0173] In the presence of our virus-engulfing shells (half T=1 shells), virus interactions with the surface were blocked up to 99% (FIG. 45g bottom), thus confirming the interaction-inhibiting capacity of our shells. Control experiments with shells lacking HBV trapping antibody resulted in minimal virus blocking compared to the signal generated by naked HBV core particles that represent baseline 0% virus blocking.

[0174] HBV core particles directly incubated with antibodies, but without any shells present, were negligibly blocked from binding the surface. This finding indicates that the antibodies by themselves do not fully passivate the HBV capsid surface even though they were added at 400-fold excess over HBV particles. However, in contrast, when using the shells functionalized with on average as few as five antibodies, we achieved a virus blocking efficiency of greater than 80%. The blocking was nearly complete (up to 99%) when using more than five antibodies in the shells. The data thus shows that the shell-trapping method can be highly effective even when only a handful of physical interactions are formed between the virus surface and surrounding shell. Our data indicates that the shells, and not the antibodies used for holding the virus inside the shell, shield the virus from its exterior by steric occlusion.

### Example 7: Virus Neutralization in Human Cells

[0175] We tested the neutralization capacity of the DNA-origami half octahedron shells using adeno-associated virus serotype 2 (AAV2) (46) virions carrying an enhanced green fluorescent protein (eGFP) expression cassette (59) using both microscopy and flow cytometry (FIG. 46a). We stabilized DNA shells with UV point welding and PEG242-oligolysine/oligolysine as described above. AAV2 particles were successfully trapped in DNA half shells functionalized with anti-AAV2 antibody in the shell interior, in serum in the presence of bovine serum albumin (BSA) as seen by direct imaging with TEM (FIG. 46b). Since AAV belongs to a completely different virus family than HBV, this data also establishes the modularity of the shell: by swapping out the virus-binding moieties one can trap different types of viruses.

[0176] We quantified the efficacy of virus neutralization by determining the dose response curves for DNA half-shells functionalized with on average 36 anti-AAV2 antibodies per half-shell and free anti-AAV2 antibodies as reference (FIG. 49). The number of eGFP positive cells served as a readout for infection efficacy using flow cytometry analysis. The DNA half shells neutralized AAV2 with an estimated half maximal inhibitory concentration (IC50) of ˜0.3 nM (FIG. 49). At our conditions, the IC50 corresponded to approximately 2.5 half-shells per infectious virus particle. The DNA half shells had increased neutralization capacity compared to the activity of the free anti-AAV2 (FIG. 46c,d, FIG. 49). This neutralization enhancement is best appreciated in fluorescence microscopy images (FIG. 46d), where few eGFP positive cells remain in the samples with AAV2-trapping DNA half shells, whereas many eGFP positive cells appear in samples exposed to the identical dose of anti-AAV2 antibodies free in solution. This experiment demonstrates that the shells function in physiological conditions with live cells. It also shows that the shells can further augment the already quite potent neutralization capabilities of the anti-AAV2 antibodies.

[0177] As above with the in vitro HBV blocking experiments in FIG. 4, the enhanced neutralization suggests that the shells trap viruses in a multivalent fashion and that the shell material additionally contributes as a viral-surface occluding agent.

[0178] We also investigated whether the DNA-origami half shells without any conjugated antibody had an effect, and we found a low but non-negligible neutralization activity at the highest origami concentration tested (FIG. 49). We suggest this activity arises from electrostatic interactions between the PEG-oligolysine/oligolysine coated DNA-shells, and the AAV2 particles. Finally, we tested if exposure to the DNA half shells had any effect on cell viability and found no significant effect across any of the concentrations used in this study (FIG. 49).

### DISCUSSION

[0179] We have successfully experimentally demonstrated a symmetry-based approach for self-assembly of virus-like shells of various sizes with high yield and fidelity. This capability is enabled by rigid building blocks that correspond to patchy particles (44) featuring specific lock-and-key interactions whose geometry can be designed and realized with sub-nanometer precision. The exquisite programmability of the shell building blocks furthermore allows building defined-size partial shells, such as half-shells or shells with entry portals, which we propose as virus-neutralizing agents for trapping and inactivating viruses. We tested this concept with HBV core particles as a model virus particle, and in our experiments, we achieved up to 99% inactivation by engulfing HBV in a surrounding shell.

[0180] In our concept all recognition elements are integrated on the nanoparticle rather than relying on cascaded reactions between multiple diffusing components. This makes our concept insensitive to dilution, which is a crucial requirement for potential future biomedical applications. Beyond the proposed application as virus-neutralizing agents for trapping and inactivating viruses, variants of our shells could also be used as antigen-carriers for vaccination, as DNA or RNA carriers for gene therapy or gene modification, as drug delivery vehicles, as protective storage containers, or to build compartmentalized systems such as synthetic organelles. Our shells cover a wide range of internal cavity dimensions and may also offer opportunities as alternative gene delivery vectors that can accommodate genomic information much larger as those that can be delivered with e.g. adeno associated viruses (AAV) (45, 46), which are popular gene therapy vectors. The nucleic acids to be delivered could be combined with proteins or protein complexes rendering e.g. CRISPR/Cas based gene silencing or gene modification approaches safer and more efficient.

[0181] Whereas natural viruses assemble from protein subunits, we constructed icosahedral shells that consist purely of DNA, thereby taking viral construction principles from protein chemistry into the realm of nucleic acids. Nucleic acids are durable, available commercially, and easily functionalized and modified as we also showed in this work. By using nucleic acids to engulf viral pathogens, we have opened up a new realm for developing drugs to combat viral threats. Using nucleic-acid based agents potentially confers the advantage of avoiding neutralization, phagocytosis and degradation by pathways of the innate and adaptive immune system targeting protein structures. Recently, methods to produce DNA-based objects at scale (47) have emerged. These methods may help transform our concept for fighting viral diseases into candidate therapeutics for clinical use.

[0182] Methods

[0183] 1. Self-Assembly of Shell Subunits

[0184] All self-assembly experiments were performed in standardized “folding buffers” containing x mM MgCl₂ in addition to 5 mM Tris Base, 1 mM EDTA, 5 mM NaCl at pH 8 (FoBx). Single-scaffold-chain DNA origami objects were self-assembled in one-pot folding reactions containing 50 nM scaffold DNA and 200 nM of each staple strand. DNA origami objects containing multiple scaffolds were self-assembled using each scaffold DNA chain at 10 nm concentration and 200 nM of each staple strand. The individual scaffolds were sequence-orthogonal and designed and produced as described previously (48, 49). Folding buffer (FoB20) was used with x=20 mM MgCl₂. All reaction mixtures were subjected to thermal annealing ramps as detailed in Table 2 in Tetrad (Bio-Rad) thermal cycling devices. Staple strands were purchased from IDT (Integrated DNA Technologies).

TABLE 2
Temperature ramps and scaffold molecules used for self-assembly of shell building blocks.

| | Denaturation phase | Temperature | Storage | |
|---|---|---|---|---|
| Object | temperature (15 min) (° C.) | ramp (1° C./1 h) | temperature (° C.) | Scaffold |
| T_octa | 65 | 60-56° C. | 20 | M13 8064 |
| T = 1 | 65 | 58-54° C. | 20 | M13 8064 |
| T = 1 − 5° | 65 | 58-54° C. | 20 | M13 8064 |
| T = 1 + 5° | 65 | 58-54° C. | 20 | M13 8064 |
| T = 3 | 65 | 54-52° C. | 20 | M13 8064 |
| T = 4_iso | 65 | 56-54° C. | 20 | M13 8064 |
| T = 4_equi | 65 | 58-54° C. | 20 | M13 8064 |
| T = 9_pent | 65 | 56-52° C. | 20 | M13 7249 |
| T = 9_hex1 | 65 | 56-52° C. | 20 | M13 8064 |
| T = 9_hex2 | 65 | 58-54° C. | 20 | M13 8064 |
| T_octa_half | 65 | 58-54° C. | 20 | M13 8064 |
| T_pent | 65 | 58-54° C. | 20 | M13 8064 |
| T = 1 (⅔ triangles) | | | | |
| T_ ring | 65 | 56-52° C. | 20 | M13 8064 |
| T = 1 (2 triangles) | | | | |
| T_ring1 | 65 | 56-52° C. | 20 | M13 8064 |
| T = 1 (3 triangles) | | | | |
| T_ring2 | 65 | 56-52° C. | 20 | M13 8064 |
| T = 1 (3 triangles) | | | | |
| Triangular | 65 | 60-44° C. | 20 | M13 8064 |
| brick | | | | |

(for scaffold/tem plate sequences see Table 1; for staple sequences see Table 1 and Sequence Listing).

[0185] 2. Purification of Shell Subunits and Self-Assembly of Shells

[0186] All shell subunits were purified using gel purification and, if necessary, concentrated with ultrafiltration (Amicon Ultra 500 μl with 100 kDa molecular weight cutoff) before self-assembling the subunits into shells. Both procedures were performed as previously described (39) with the following alterations: for gel purification, we used 1.5% agarose gels containing 0.5x TBE and 5.5 mM MgCl₂. For ultrafiltration, the same filter was filled with gel-purified sample multiple times (about 2-5 times, ˜400 μl every step) in order to increase the concentration of objects that are recovered from the filter. Before putting the filter upside down in a new filter tube we performed two washing steps with 1xFoB5 (˜400 μl) to achieve well-defined buffer conditions for the shell assembly. To assemble the purified (and concentrated) shell subunits into shells we adjusted the subunit and MgCl₂ concentrations by adding 1xFoB5 and 1.735 M MgCl₂ in suitable amounts. Typical subunit concentrations were in the range of 5 nM and up to 100 nM (for cryo-EM measurements, see Table 3). Typical MgCl₂ concentrations for shell self-assembly were in the range of 10-40 mM. Shell self-assembly was performed at 40° C. Reaction times were varied depending on the shell type (see FIG. 3A). Both, all shell subunits and assembled shells, can be stored at room temperature for several months.

[0187] 3. Half Shells and HBV Core Binding

[0188] Nine staples on the inside of the triangles were modified with handles with 26 single-stranded bases at the 5′ ends (seq.: ‘GCAGTAGAGTAGGTAGAGATTAGGCA-oligonucleotide’, for design details see FIGS. 40, 41, Table 1 and Sequence Listing). The triangles were purified and assembled as described above. Oligonucleotides complementary to the handle-sequence and modified with a thiol group at the 3′ end were coupled to the HBcore 17H7 antibody using a Sulfo-SMCC (Sulfosuccinimidyl-4-[N-maleimidomethyl]cyclohexane-1-carboxylate) cross-linker. The product was subsequently purified using the proFIRE® from Dynamic Biosensors. The DNA modified antibodies were added to the assembled shells and incubated over night at 25° C. HBV core particles were incubated with the modified shells for 1-4 hours at 25° C.

[0189] 4. Octahedron Oligolysine Stabilization

[0190] The octahedral shells were assembled at 35 mM MgCl₂ and UV cross-linked as described in (41) for 1 h using the Asahi Spectra Xenon Light source 300W MAX-303. The shells were incubated in a 0.6:1 ratio with a mixture of K₁₀ oligolysine and K₁₀-PEG_{5K} oligolysine (1:1) for 1h at room temperature as similarly described in (42).

[0191] 5. T=1 Shell Exterior Modification

[0192] The T=1 triangle and the triangular brick (FIG. 5A) were dimerized using single stranded DNA sticky ends protruding from the T=1 triangle. The protruding sequences contained three thymidines for flexibility plus 7 base long sequence motifs that were directly complementary to single stranded scaffold domains of the brick (FIG. 42). Dimerization reactions were performed at room temperature overnight using a monomer concentration of 40 nM in the presence of 11 mM MgCl₂.

[0193] 6. Gel Electrophoresis

[0194] The size distribution of folding reactions or shell assemblies was investigated using agarose gel electrophoresis. For solutions including only shell subunits, we used 1.5% agarose gels containing 0.5xTBE Buffer (22.25 mM Tris Base, 22.25 mM Boric Acid, 0.5 mM EDTA) and 5.5 mM MgCl₂. For solutions including oligomeric assemblies such as shells, an agarose concentration of 0.5% was used. The gel electrophoresis was performed in 0.5xTBE buffers supplemented with the same MgCl₂ concentration as the solutions in which the shells were incubated in. For MgCl₂ concentration larger than 15 mM, a surrounding ice-water bath was used for cooling the gel. The gel electrophoresis was performed for 1.5 to 2 hours at 90 V bias voltage. The agarose gels were then scanned with a Typhoon FLA 9500 laser scanner (GE Healthcare) with a pixel size of 50 μm/pix.

[0195] 7. Negative-Staining Tem

[0196] Samples were incubated on glow-discharged collodion-supported carbon-coated Cu400 TEM grids (in-house production) for 30 to 120 s depending on structure and MgCl₂ concentration. The grids were stained with 2% aqueous uranyl formiate solution containing 25 mM sodium hydroxide. Imaging was performed with magnifications between 10000× to 42000×. T=3 triangles were imaged on a Phillips CM100 equipped with a AMT 4Mpx CCD camera. All other negative staining data was acquired at a FEI Tecnai T12 microscope operated at 120 kV with a Tietz TEMCAM-F416 camera. TEM micrographs were high-pass filtered to remove long-range staining gradients and the contrast was auto-leveled (Adobe Photoshop CS6). To obtain detailed information on individual particles and investigate successful encapsulation negative stain EM tomography was used as a visualization technique. The grids were prepared as described above, and the tilt series acquired with magnifications between 15000× and 30000× using the FEI Tecnai 120. The stage was tilted from −50° to 50° and micrographs were acquired in 2° increments.

[0197] All tilt series were subsequently processed with IMOD (50) to acquire tomograms. The micrographs were aligned to each other by calculating a cross correlation of the consecutive tilt series images. The tomogram is subsequently generated using a filtered back-projection. The Gaussian-Filter used a cutoff between 0.25 and 0.5 and a fall-off of 0.035.

[0198] 8. Cryo Electron Microscopy

[0199] The DNA origami concentrations used for preparing the cryo-EM grids are summarized in Table 3. Samples with concentrations higher than 100 nM were applied to glow-discharged C-flat 1.2/1.3 or 2/1 thick grids (Protochip). Samples containing shells with less than 30 nM monomer concentrations were incubated on glow-discharged grids with an ultrathin carbon film supported by a lacey carbon film on a 400 mesh copper grid (Ted Pella). The concentration of all single triangles was increased above 500 nM with PEG precipitation (39). 1 ml of folding reaction (˜50 nM monomer concentration) was mixed with 1 ml of PEG, centrifuged at 21 k rcf for 25 min and re-suspended in 50 to 100 μl 1 xFoB5. The DNA origami triangles used for assembling the shells were all gel purified and concentrated with ultrafiltration as described above before increasing the MgCl₂ concentration. Plunge freezing in liquid ethane was performed with a FEI Vitrobot Mark V with a blot time of 1.5 to 2 s, a blot force of −1 and a drain time of 0 s at 22° C. and 95% humidity. The samples with less than 100 nM monomer concentrations were incubated on the support layer for 60 to 90 s before blotting. All cryo-EM images were acquired with a Cs-corrected Titan Krios G2 electron microscope (Thermo Fisher) operated at 300 kV and equipped with a Falcon III 4 k direct electron detector (Thermo Fisher). We used the EPU software for automated single particle acquisition. See Table 3 for microscope settings for all individual datasets. The defocus for all acquisitions was set to −2 μm. The image processing was done at first in RELION-2 (51) and then later in RELION-3 (52). The recorded movies were subjected to MotionCor2 (53) for movie alignment and CTFFIND4.1 (54) for CTF estimation. After reference-free 2D classification the best 2D class averages, as judged by visual inspection, were selected for further processing. A subset of these particles was used to calculate an initial model. After one to two rounds of 3D classification, the classes showing the most features or completely assembled shells were selected for 3D auto-refinement and post-processing. For the corresponding shells octahedral (O) or icosahedral (I1) symmetry was used for the last two steps.

TABLE 3
Cryo-EM imaging conditions.

| | | | | | | Resolution | |
|---|---|---|---|---|---|---|---|
| | Concentration | # of | # of | Dose | Pixel size | of resulting | |
| Object | (nM) | particles | fractions | (e/A\hat{ }2) | (A/pix) | 3D map (A) | Symmetry |
| Octa monomer | 700 | 16524 | 5 | 42.57 | 2.28 | 18.69 | C1 |
| T = 1 monomer | 500 | 9496 | 7 | 51.16 | 2.28 | 20.27 | C1 |
| T = 3 monomer | 500 | 11080 | 7 | 53.17 | 2.28 | 19.09 | C1 |
| T = 4_iso | 500 | 16904 | 7 | 48.53 | 2.28 | 17.22 | C1 |
| T = 4_equi | 500 | 34288 | 7 | 48.26 | 2.28 | 21.21 | C1 |
| T = 9_pent | 800 | 25053 | 8 | 47.9 | 1.79 | 14.92 | C1 |
| T = 9_hex1 | 800 | 38498 | 13 | 36.85 | 1.79 | 12.92 | C1 |
| T = 9_hex2 | 800 | 11481 | 8 | 48 | 1.79 | 15.04 | C1 |
| Octa shell (17.5 mM) | 130 | 3384 | 11 | 42.71 | 2.28 | 19.64 | O |
| T = 1 shell (20 mM) | 110 | 2578 | 10 | 51.11 | 2.28 | 21 | I1 |
| T = 1 shell (25 mM) | 50 (lacey | 720 | 7 | 31.26 | 2.28 | 22.21 | I1 |
| | carbon grid) | | | | | | |
| T = 3 shell (20 mM) | 20 | 612 | — | 22.96 | 3.71 | 36.15 | I1 |
| T = 4 shell (25 mM) | 21 (T_iso) | 255 | — | 25 | 3.71 | 47.87 | I1 |
| | 7 (T_equi) | | | | | | |
| Octa_half shell (30 mM) | 180 | 6801 | 10 | 40.44 | 2.9 | 20.41 | C4 |
| Octa_half shell | 40 | 2707 | 7 | 44.38 | 2.9 | 23 | C1 |
| (30 mM) + HBV core | | | | | | | |
| T = 1 (FRET)_half | 180 | 8725 | 10 | 40.44 | 2.9 | 15.16 | C1 |
| shell (2 triangles, | | | | | | | |
| 30 mM) | | | | | | | |
| T = 1 (FRET)_half | 50 | 1770 | 7 | 44.79 | 2.9 | 23 | C5 |
| shell + HBV core (2 | | | | | | | |
| triangles, 30 mM) | | | | | | | |
| T = 1 (FRET)_15mer | 210 | 3194 | 10 | 29.17 | 2.9 | 22.3 | C5 |
| shell (3 triangles, | | | | | | | |
| 30 mM) | | | | | | | |
| spiky shell (22.5 mM) | 150 | 3847 | 8 (dataset1) | 25.76 (dataset1) | 3.76 | 22 | I1 |
| | | | 11 (dataset 2) | 30.00 (dataset 2) | | | |
| triangular brick | 1000 | 38132 | 7 | 78.6 | 2.28 | 11.9 | C1 |

[0200] 9. In Vitro Virus Blocking ELISA

[0201] Various concentrations of assembled half-T1 shells were incubated overnight at room temperature with 2 nM oligonucleotide-conjugated capture antibody (anti-HBc 17H7, Isotype IgG-2b) in FoB30-T (FoB30+0.05% Tween-20). The next day the pre-incubated mixtures were added to 5 pM HBV core particles and incubated overnight at room temperature, yielding 1 nM capture antibody, 2.5 pM HBV core particle and 0-200 pM half-T=1 shells. A flat-bottom transparent 96 well microplate (Nunc MaxiSorp) was treated overnight at 4° C. with 100 μl/well anti-CAgHB antibody (1 μg/ml in PBS). After washing 4 times with 200 μl/well PBS-T (PBS+0.05% Tween-20) the well surface was blocked by incubating with 200 μl/well 5% bovine serum albumin in PBS for 2 hours at room temperature. After washing 4 times with 200 μl/well FoB30-T, 90 μl of the pre-incubated samples were added to the wells and incubated for 2 hours at room temperature, followed by washing and subsequent incubation for 1 hour with 100 μl/well horseradish peroxidase conjugated detection antibody (anti-CAgHB-HRP in FoB30-T). After washing with FoB30-T, 100 μl/well HRP substrate (3,3′,5,5′-Tetramethylbenzidine, Life Technologies) was added and product formation was monitored in time by measuring the absorbance at 650 nm with a 60 s interval in a plate reader pre-equilibrated to 30° C. (CLARIOstar, BMG LABTECH). HRP activity was calculated by fitting linear regression slopes to the linear regime of the kinetic data (typically the first 5 min). Virus blocking efficiency was calculated relative to a control of HBV core particles only and blank measurements. All experiments were performed in triplicates. Antibodies used for the ELISA were kindly provided by Centro De Ingenieria Genetica y Biotecnologia de sancti spiritus in Cuba.

[0202] 10. Helium Ion Microscopy (HIM)

[0203] Imaging was performed with negative-stained TEM grids coated with a 5 nm layer of AuPd using a Quorum Q150T sputter coater in ORION Nanofab (Zeiss). We used an acceleration voltage of 30 kV and a beam current of 0.3 to 0.4 pA. The images were acquired in scanning mode with an Everhart-Thornley 2 k detector.

[0204] 11. Production of HBV Core Particles

[0205] Hepatitis B virus core particles of genotype D (subtype ayw2) were produced recombinantly in E. coli K802 and BL21 cells (purchased from the Latvian Biomedical Research and Study Centre, Riga, Latvia). Briefly, particles were obtained by sonication and clarification from bacterial protein extracts and purified by ammonium sulphate precipitation and subsequent anion exchange and size exclusion chromatography as described (55). Final preparations were constantly kept at 4° C. in the dark in conventional PBS (including 0.05% NaN₃, 1 mM DTT).

[0206] 12. Production of Anti-HBc Antibody

[0207] Anti-HBV core (anti-HBc) antibody 17H7 (Isotype IgG-2b) was produced by the Monoclonal Antibody Core Facility at Helmholtz Zentrum Munchen in Munich (HMGU). Briefly, mouse HBc-recognizing B cells were generated by common hybridoma technology. The mice were challenged with the peptide NLEDPASRDLVVC (aa 75-86 of HBV core). Mouse hybridoma clones were selected, and secreted antibodies were analyzed by immune staining and precipitation of HBcAg and ELISA for native antigen recognition and by Western Blot analysis for detection of denatured antigen. Final 17H7 preparations were purified via standard affinity chromatography using a protein A/G column and concentrated to 0.8 mg/ml (5.33 μM) of protein and kept in conventional PBS (137 mM NaCl, 10 mM Phosphate, 2.7 mM KCl, pH 7.4) at 4° C. in the dark.

[0208] 13. Cargo Encapsulation in T=1 Shells

[0209] Nine staples of the T=1 shell subunits were modified by adding 16 bases on the 5′ ends. These nine modified staples and unmodified T=1 staples are folded with p8064 scaffold to produce T=1 triangles with nine ssDNA “handles” (FIG. 50A, left). The 16-base ssDNA handles are located on the shell-inward facing surface of the monomers. 8 of those 9 strands were oriented facing inwards towards the interior of the monomer and consequently may not have been accessible to the cargo. Single-stranded DNA cargo was prepared by attaching staple strands to the p8064 ssDNA circular scaffold with a 16 base-long overhang that was complementary to the handles on the shell subunits. An oligo containing a CY5 dye was also hybridized to the scaffold to enable fluorescence read-out by laser scanning of agarose gels (FIG. 50A, middle and FIG. 42C). In order to avoid having the unbound staples in cargo solution, which would passivate the monomers, 20 different staples are mixed with the scaffolds in 1:2 ratio. To anneal staples to the circular ssDNA, FOB15 buffer is used with a temperature ramp of 65° C. for 15 min, 60° C. to 44° C. for 1 h/1° C. To encapsulate gold nanoparticles, complementary handles of the monomer's handles are attached to the gold nanoparticles with a diameter of 30 nm (Cytodiagnostics, OligoREADY Gold Nanoparticle Conjugation Kit). A schematic and a negative stain TEM tomogram slice is shown in FIG. 50, B and C. To increase the visibility of the encapsulated circular ssDNA in TEM images, gold nanoparticles with a diameter of 20 nm (Cytodiagnostics, OligoREADY Gold Nanoparticle Conjugation Kit) were attached to the circular ssDNA scaffold (schematic and negative stain TEM are shown in FIG. 50, B and C last images from the right). T=1 shells, with & without cargo were assembled in 1xFoB20 buffer at 40° C. for 3 days. Shell subunits were gel purified prior to assembly. Concentration of triangles was 16 nM. Concentration of cargo (of any type) was 0.8 nM.

[0210] 14. Half Shells and HBV Core Binding

[0211] Anti-HBV core (anti-HBc) antibody 17H7 (Isotype IgG-2b) was produced by the Monoclonal Antibody Core Facility at Helmholtz Zentrum Munchen in Munich (HMGU). Briefly, mouse HBc-recognizing B cells were generated by common hybridoma technology. The mice were challenged with the peptide NLEDPASRDLVVC (aa 75-86 of HBV core). Mouse hybridoma clones were selected, and secreted antibodies were analyzed by immune staining and precipitation of HBcAg and ELISA for native antigen recognition and by Western Blot analysis for detection of denatured antigen. Final 17H7 preparations were purified via standard affinity chromatography using a protein A/G column and concentrated to 0.8 mg/ml (5.33 μM) of protein and kept in conventional PBS (137 mM NaCl, 10 mM Phosphate, 2.7 mM KCl, pH 7.4) at 4° C. in the dark.

[0212] 15. Shell Oligolysine Stabilization

[0213] The complete octahedral shells were assembled at 35 mM MgCl₂ and UV cross-linked as described in (33) for 1 h at 310 nm wavelength using the Asahi Spectra Xenon Light source 300W MAX-303. The shells were incubated in a 0.6:1 ratio of N:P with a mixture of K10 oligolysine and K10-PEG5K oligolysine (1:1) for 1h at room temperature as similarly described in (34). The octahedra were incubated in 55% mouse serum for 1h and 24h at 37° C. To allow imaging with negative stain the samples were diluted with PBS to a final mouse serum concentration of 5%, immediately before application to the negative stain grids.

[0214] The partial shells used for virus neutralization experiments in vivo were assembled at 60 mM MgCl₂ and UV cross-linked as described in (33) for 30 min using the Asahi Spectra Xenon Light source 300W MAX-303. We introduced three-bases long sticky overhangs at every stacking contact and added one thymidine at the ends of both oligonucleotides (see FIG. 51) to covalently crosslink the triangular subunits. The sticky overhangs were necessary to compensate for the decrease in blunt-end stacking induced by addition of the thymidines for UV point welding. The shells were incubated in a 0.6:1 ratio N:P with a mixture of K10 oligolysine and K10-PEG5K oligolysine (1:1) for 1h at room temperature as similarly described in (34). The DNA modified antibodies were added to the assembled shells and incubated over night at room temperature.

[0215] 16. Cell Culture and Neutralization Assays

[0216] HEK293T (human embryonic kidney cell line, DSMZ) cells were cultured in Dulbecco's Modified Eagle's Medium (DMEM, Gibco, cat. no. 31966047) with 10% heat-inactivated Fetal Bovine Serum (FBS, Sigma-Aldrich, cat. no. F9665). Cells were cultured routinely in a humidified incubator at 37° C. with 5% CO2. AAV2 carrying eGFP (Biocat, cat. no. AA002-GVO-GC) were utilized for transduction experiments, where the concentration of infectious particles was determined by titration as per the manufactures protocol. Briefly, cells were seeded in 24-well plates at 80,000 cells mL-1 16-24 h prior to transduction, and harvested 72 h after transduction for quantification of transduction efficiency by flow cytometry. Samples were acquired and analyzed using Attune™ NxT Flow Cytometer and software (Thermofisher) respectively. 20,000 single cell events, gated on side scatter area vs height were recorded for analysis. eGFP was excited by 488 nm laser, and emission was measured with a 530/30 nm bandpass filter. Untreated cells were used as a negative control. Concentration of infectious particles was determined to be 1.23×109 IFU mL-1. Total number of AAV2 virus particles was measured by ELISA as per manufacture's protocol (Progen, cat. No. PRATV), and determined to be 2.24×1012 VP mL-1. For neutralization experiments, cells were cultured as above. 48-well plates were coated with poly-L-lysine (Sigma Aldrich cat. no. P2636, 0.1 mg mL-1, 10 min r.t. incubation) and then washed 2× with H2O and then PBS. HEK293T cells were seeded at 80,000 cells mL-1 16-24 h prior to transduction. Stock solutions were prepared for the overnight binding of conjugated anti-AAV2 to half shell origamis. Binding occurred in the presence of 0.1 mg mL-1 bovine serum albumin (BSA). Similarly, conjugated anti-AAV2, and half shells without antibody were also prepared in an identical manner. The next day, the half shells were coated with PEG-oligolysine/664 oligolysine by r.t. incubation for 2 h. Next, each of the different titration conditions were prepared and diluted to a total of 33.5 μL per condition with PBS. 4 μL of diluted AAV-2 sample (1/100, in PBS) was added and mixed, and samples were left to incubate (2 h, r.t.). Cells were washed with PBS and 62.5 μL of DMEM with 2% FBS was added to each well. Mixtures (37.5 μL) were then added dropwise to each well. Cells were incubated for 2 h, before 100 μL of DMEM with 18% FBS and 1x antibiotic/antimycotic was added. The cells were incubated for a further 22 h, before media was removed, cells were washed with 1x PBS, and 250 μL of DMEM with 10% FBS and 1x antibiotic/antimycotic was added. At 48 h post-transduction, the cells were trypsinized and prepared for flow cytometry. Transduction efficiency was quantified by flow cytometry as above, representative gates are given in FIG. 52. Statistical analyses were performed with Graphpad Prism (GraphPad Software Inc.). For epifluorescence imaging, the procedure was identical as above, with the exception that the cells were seeded in 8-chambered well slides (Nunc™ Lab-Tek™, Thermofisher). After the total 48 h timepoint, cells were washed with 1x PBS and then fixed with 2% paraformaldehyde (PFA). Cells were washed again (1 x PBS), and cell nuclei were stained (Hoescht 3342, diluted in PBS, 5 min, r.t.). Cells were washed with PBS, and the samples were mounted using Fluoromount-G aqueous mounting media. Samples were imaged using a Tikon Eclipse Ti2-E inverted microscope, using a 10× objective. Images were collected using NIS-Elements AR software, and processed using ImageJ.

[0217] 17. Viability Assay

[0218] Cytotoxicity was quantified by cell viability following 24 or 48 h incubation of cells with the half-shell mixtures. HEK293T cells were seeded in poly-L-lysine treated 96-well plates at 80,000 cells mL-1. Cells were allowed to settle overnight, media was removed and cells exposed to half shell mixtures in an identical procedure to the neutralisation assays. Cells were incubated with half shell solutions for a further 24 h or 48 h, and alamarBlue reagent (Invitrogen, 10 μL per well) was added. Plates were mixed and incubated for 4 h before being read on plate reader (CLARIOstar). Absorbance readings at 570 nm and 600 nm were taken, as per manufacturer's protocol. Measured values were normalized to control wells, which were treated identically, but received PBS containing no origami structures. All conditions were measured at least in triplicate.

### REFERENCES

[0219] 1. C. Gortazar et al., Crossing the interspecies barrier: opening the door to zoonotic pathogens. PLoS pathogens 10, e1004129 (2014).
[0220] 2. S. S. Morse et al., Prediction and prevention of the next pandemic zoonosis. Lancet 380, 1956-1965 (2012).
[0221] 3. J. J. O'Brien, D. M. Campoli-Richards, Acyclovir. An updated review of its antiviral activity, pharmacokinetic properties and therapeutic efficacy. Drugs 37, 233-309 (1989).
[0222] 4. J. LaBonte, J. Lebbos, P. Kirkpatrick, Enfuvirtide. Nat Rev Drug Discov 2, 345-346 (2003).
[0223] 5. W. L. Davies et al., Antiviral Activity of 1-Adamantanamine (Amantadine). Science 144, 862-863 (1964).
[0224] 6. Y. K. Gupta, M. Meenu, P. Mohan, The Tamiflu fiasco and lessons learnt. Indian J Pharmacol 47, 11-16 (2015).
[0225] 7. J. M. Steichen et al., A generalized HIV vaccine design strategy for priming of broadly neutralizing antibody responses. Science 366, (2019).
[0226] 8. K. O. Saunders et al., Targeted selection of HIV-specific antibody mutations by engineering B cell maturation. Science 366, (2019).
[0227] 9. B. K. Ganser-Pornillos, O. Pornillos, Restriction of HIV-1 and other retroviruses by TRIM5. Nat Rev Microbiol 17, 546-556 (2019).
[0228] 10. K. A. Skorupka et al., Hierarchical assembly governs TRIM5alpha recognition of HIV-1 and retroviral capsids. Sci Adv 5, eaaw3631 (2019).
[0229] 11. M. Mammen, S. K. Choi, G. M. Whitesides, Polyvalent Interactions in Biological Systems: Implications for Design and Use of Multivalent Ligands and Inhibitors. Angew Chem Int Ed Engl 37, 2754-2794 (1998).
[0230] 12. V. Cagno, E. D. Tseligka, S. T. Jones, C. Tapparel, Heparan Sulfate Proteoglycans and Viral Attachment: True Receptors or Adaptation Bias? Viruses 11, (2019).
[0231] 13. F. H. Crick, J. D. Watson, Structure of small viruses. Nature 177, 473-475 (1956).
[0232] 14. J. B. Bale et al., Accurate design of megadalton-scale two-component icosahedral protein complexes. Science 353, 389-394 (2016).
[0233] 15. N. P. King et al., Accurate design of co-assembling multi-component protein nanomaterials. Nature 510, 103-108 (2014).
[0234] 16. Y. T. Lai et al., Structure of a designed protein cage that self-assembles into a highly porous cube. Nature chemistry 6, 1065-1071 (2014).
[0235] 17. G. L. Butterfield et al., Evolution of a designed protein assembly encapsulating its own RNA genome. Nature 552, 415-420 (2017).
[0236] 18. R. linuma et al., Polyhedra self-assembled from DNA tripods and characterized with 3D DNA-PAINT. Science 344, 65-69 (2014).
[0237] 19. K. F. Wagenbauer, C. Sigl, H. Dietz, Gigadalton-scale shape-programmable DNA assemblies. Nature 552, 78-83 (2017).
[0238] 20. D. L. Caspar, A. Klug, Physical principles in the construction of regular viruses. Cold Spring Harbor symposia on quantitative biology 27, 1-24 (1962).
[0239] 21. R. Twarock, A. Luque, Structural puzzles in virology solved with an overarching icosahedral design principle. Nature communications 10, 4414 (2019).
[0240] 22. A. L. Llamas-Saiz et al., Structure determination of minute virus of mice. Acta Crystallogr D Biol Crystallogr 53, 93-102 (1997).
[0241] 23. J. A. Speir, S. Munshi, G. Wang, T. S. Baker, J. E. Johnson, Structures of the native and swollen forms of cowpea chlorotic mottle virus determined by X-ray crystallography and cryo-electron microscopy. Structure 3, 63-78 (1995).
[0242] 24. P. W. K. Rothemund, Folding DNA to create nanoscale shapes and patterns. Nature 440, 297-302 (2006).
[0243] 25. S. M. Douglas et al., Self-assembly of DNA into nanoscale three-dimensional shapes. Nature 459, 414-418 (2009).
[0244] 26. C. E. Castro et al., A primer to scaffolded DNA origami. Nature methods 8, 221-229 (2011).
[0245] 27. R. Veneziano et al., Designer nanoscale DNA assemblies programmed from the top down. Science 352, 1534 (2016).
[0246] 28. E. Benson et al., DNA rendering of polyhedral meshes at the nanoscale. Nature 523, 441-444 (2015).
[0247] 29. K. E. Dunn et al., Guiding the folding pathway of DNA origami. Nature 525, 82-86 (2015).
[0248] 30. X. C. Bai, T. G. Martin, S. H. Scheres, H. Dietz, Cryo-EM structure of a 3D DNA-origami object. Proceedings of the National Academy of Sciences of the United States of America 109, 20012-20017 (2012).
[0249] 31. J. J. Funke, H. Dietz, Placing molecules with Bohr radius resolution using DNA origami. Nature nanotechnology 11, 47-52 (2016).
[0250] 32. R. Jungmann et al., DNA origami-based nanoribbons: assembly, length distribution, and twist. Nanotechnology 22, 275301 (2011).
[0251] 33. W. Liu, H. Zhong, R. Wang, N. C. Seeman, Crystalline two-dimensional DNA-origami arrays. Angewandte Chem ie 50, 264-267 (2011).
[0252] 34. Y. Suzuki, M. Endo, H. Sugiyama, Lipid-bilayer-assisted two-dimensional self-assembly of DNA origami nanostructures. Nature communications 6, 8052 (2015).
[0253] 35. Y. Ke et al., DNA brick crystals with prescribed depths. Nature chemistry 6, 994-1002 (2014).
[0254] 36. T. Gerling, K. F. Wagenbauer, A. M. Neuner, H. Dietz, Dynamic DNA devices and assemblies formed by shape-complementary, non-base pairing 3D components. Science 347, 1446-1452 (2015).
[0255] 37. S. M. Douglas et al., Rapid prototyping of 3D DNA-origami shapes with caDNAno. Nucleic acids research 37, 5001-5006 (2009).
[0256] 38. C. Maffeo, J. Yoo, A. Aksimentiev, De novo reconstruction of DNA origami structures through atom istic molecular dynamics simulation. Nucleic acids research 44, 3013-3019 (2016).
[0257] 39. K. F. Wagenbauer et al., How we make DNA origami. Chembiochem: a European journal of chemical biology, (2017).
[0258] 40. T. Gerling, H. Dietz, Reversible Covalent Stabilization of Stacking Contacts in DNA Assemblies. Angewandte Chemie 58, 2680-2684 (2019).
[0259] 41. T. Gerling, M. Kube, B. Kick, H. Dietz, Sequence-programmable covalent bonding of designed DNA assemblies. Sci Adv 4, eaau1157 (2018).
[0260] 42. N. Ponnuswamy et al., Oligolysine-based coating protects DNA nanostructures from low-salt denaturation and nuclease degradation. Nature communications 8, 15654 (2017).
[0261] 43. M. Langecker et al., Synthetic lipid membrane channels formed by designed DNA nanostructures. Science 338, 932-936 (2012).
[0262] 44. N. Kern, D. Frenkel, Fluid-fluid coexistence in colloidal systems with short-ranged strongly directional attraction. J Chem Phys 118, 9882-9889 (2003).
[0263] 45. M. F. Naso, B. Tomkowicz, W. L. Perry, 3rd, W. R. Strohl, Adeno-Associated Virus (AAV) as a Vector for Gene Therapy. BioDrugs 31, 317-334 (2017).
[0264] 46. D. Wang, P. W. L. Tai, G. Gao, Adeno-associated virus vector as a platform for gene therapy delivery. Nat Rev Drug Discov 18, 358-378 (2019).
[0265] 47. F. Praetorius et al., Biotechnological mass production of DNA origami. Nature 552, 84-87 (2017).
[0266] 48. F. A. S. Engelhardt et al., Custom-Size, Functional, and Durable DNA Origami with Design-Specific Scaffolds. ACS nano, (2019).
[0267] 49. B. Kick, F. Praetorius, H. Dietz, D. Weuster-Botz, Efficient Production of Single-Stranded Phage DNA as Scaffolds for DNA Origami. Nano letters, (2015).
[0268] 50. J. R. Kremer, D. N. Mastronarde, J. R. McIntosh, Computer visualization of three-dimensional image data using IMOD. Journal of structural biology 116, 71-76 (1996).
[0269] 51. D. Kimanius, B. O. Forsberg, S. H. Scheres, E. Lindahl, Accelerated cryo-EM structure determination with parallelisation using GPUs in RELION-2. Elife 5, (2016).
[0270] 52. J. Zivanov et al., New tools for automated high-resolution cryo-EM structure determination in RELION-3. Elife 7, (2018).
[0271] 53. S. Q. Zheng et al., MotionCor2: anisotropic correction of beam-induced motion for improved cryo-electron microscopy. Nature methods 14, 331-332 (2017).
[0272] 54. A. Rohou, N. Grigorieff, CTFFIND4: Fast and accurate defocus estimation from electron micrographs. Journal of structural biology 192, 216-221 (2015).
[0273] 55. Sominskaya I, Skrastina D, Petrovskis I, Dishlers A, Berza I, et al. (2013) A VLP library of Cterminally truncated Hepatitis B core proteins: correlation of RNA encapsidation with a Th1/Th2 switch in the immune responses of mice. PLoS One 8: e75938.
[0274] 56. P. S. Kwon et al., Designer DNA architecture offers precise and multivalent spatial pattern-recognition for viral sensing and inhibition. Nat. Chem. 12, 26-35 (2020).
[0275] 57. H. LI et ak, Nucleic acid-based nanoengineering: novel structures for biomedical applications, INTERFACE FOCUS 1, 772-724 (2011).
[0276] 58. E. Stahl, T. G. Martin, F. Praetorius, H. Dietz, Facile and scalable preparation of pure and dense DNA origami solutions. Angewandte Chemie 53, 12735-12740 (2014).
[0277] 59. P. Guo et al., Rapid AAV-Neutralizing Antibody Determination with a Cell-Binding Assay. Mol Ther Methods Clin Dev 13, 40-46 (2019).

The application's sequence listing, which the Patent Office published only in electronic form, follows.

SEQUENCE LISTING (4095 sequences)

SEQ ID NO: 1 - DNA, 8064 bp, Artificial sequence
  artificial DNA molecule for generation of DNA nanostructure
ggcaatgacctgatagcctttgtagatctctcaaaaatagctaccctctccggcattaatttatcagctagaacggttgaatatcatattgatggtgatttgactgtctccggcctttctcacccttttgaatctttacctacacattactcaggcattgcatttaaaatatatgagggttctaaaaatttttatccttgcgttgaaataaaggcttctcccgcaaaagtattacagggtcataatgtttttggtacaaccgatttagctttatgctctgaggctttattgcttaattttgctaattctttgccttgcctgtatgatttattggatgttaatgctactactattagtagaattgatgccaccttttcagctcgcgccccaaatgaaaatatagctaaacaggttattgaccatttgcgaaatgtatctaatggtcaaactaaatctactcgttcgcagaattgggaatcaactgttatatggaatgaaacttccagacaccgtactttagttgcatatttaaaacatgttgagctacagcattatattcagcaattaagctctaagccatccgcaaaaatgacctcttatcaaaaggagcaattaaaggtactctctaatcctgacctgttggagtttgcttccggtctggttcgctttgaagctcgaattaaaacgcgatatttgaagtctttcgggcttcctcttaatctttttgatgcaatccgctttgcttctgactataatagtcagggtaaagacctgatttttgatttatggtcattctcgttttctgaactgtttaaagcatttgagggggattcaatgaatatttatgacgattccgcagtattggacgctatccagtctaaacattttactattaccccctctggcaaaacttcttttgcaaaagcctctcgctattttggtttttatcgtcgtctggtaaacgagggttatgatagtgttgctcttactatgcctcgtaattccttttggcgttatgtatctgcattagttgaatgtggtattcctaaatctcaactgatgaatctttctacctgtaataatgttgttccgttagttcgttttattaacgtagatttttcttcccaacgtcctgactggtataatgagccagttcttaaaatcgcataaggtaattcacaatgattaaagttgaaattaaaccatctcaagcccaatttactactcgttctggtgtttctcgtcagggcaagccttattcactgaatgagcagctttgttacgttgatttgggtaatgaatatccggttcttgtcaagattactcttgatgaaggtcagccagcctatgcgcctggtctgtacaccgttcatctgtcctctttcaaagttggtcagttcggttcccttatgattgaccgtctgcgcctcgttccggctaagtaacatggagcaggtcgcggatttcgacacaatttatcaggcgatgatacaaatctccgttgtactttgtttcgcgcttggtataatcgctgggggtcaaagatgagtgttttagtgtattcttttgcctctttcgttttaggttggtgccttcgtagtggcattacgtattttacccgtttaatggaaacttcctcatgaaaaagtctttagtcctcaaagcctctgtagccgttgctaccctcgttccgatgctgtctttcgctgctgagggtgacgatcccgcaaaagcggcctttaactccctgcaagcctcagcgaccgaatatatcggttatgcgtgggcgatggttgttgtcattgtcggcgcaactatcggtatcaagctgtttaagaaattcacctcgaaagcaagctgataaaccgatacaattaaaggctccttttggagccttttttttggagattttcaacgtgaaaaaattattattcgcaattcctttagttgttcctttctattctcactccgctgaaactgttgaaagttgtttagcaaaatcccatacagaaaattcatttactaacgtctggaaagacgacaaaactttagatcgttacgctaactatgagggctgtctgtggaatgctacaggcgttgtagtttgtactggtgacgaaactcagtgttacggtacatgggttcctattgggcttgctatccctgaaaatgagggtggtggctctgagggtggcggttctgagggtggcggttctgagggtggcggtactaaacctcctgagtacggtgatacacctattccgggctatacttatatcaaccctctcgacggcacttatccgcctggtactgagcaaaaccccgctaatcctaatccttctcttgaggagtctcagcctcttaatactttcatgtttcagaataataggttccgaaataggcagggggcattaactgtttatacgggcactgttactcaaggcactgaccccgttaaaacttattaccagtacactcctgtatcatcaaaagccatgtatgacgcttactggaacggtaaattcagagactgcgctttccattctggctttaatgaggatttatttgtttgtgaatatcaaggccaatcgtctgacctgcctcaacctcctgtcaatgctggcggcggctctggtggtggttctggtggcggctctgagggtggtggctctgagggtggcggttctgagggtggcggctctgagggaggcggttccggtggtggctctggttccggtgattttgattatgaaaagatggcaaacgctaataagggggctatgaccgaaaatgccgatgaaaacgcgctacagtctgacgctaaaggcaaacttgattctgtcgctactgattacggtgctgctatcgatggtttcattggtgacgtttccggccttgctaatggtaatggtgctactggtgattttgctggctctaattcccaaatggctcaagtcggtgacggtgataattcacctttaatgaataatttccgtcaatatttaccttccctccctcaatcggttgaatgtcgcccttttgtctttggcgctggtaaaccatatgaattttctattgattgtgacaaaataaacttattccgtggtgtctttgcgtttcttttatatgttgccacctttatgtatgtattttctacgtttgctaacatactgcgtaataaggagtcttaatcatgccagttcttttgggtattccgttattattgcgtttcctcggtttccttctggtaactttgttcggctatctgcttacttttcttaaaaagggcttcggtaagatagctattgctatttcattgtttcttgctcttattattgggcttaactcaattcttgtgggttatctctctgatattagcgctcaattaccctctgactttgttcagggtgttcagttaattctcccgtctaatgcgcttccctgtttttatgttattctctctgtaaaggctgctattttcatttttgacgttaaacaaaaaatcgtttcttatttggattgggataaataatatggctgtttattttgtaactggcaaattaggctctggaaagacgctcgttagcgttggtaagattcaggataaaattgtagctgggtgcaaaatagcaactaatcttgatttaaggcttcaaaacctcccgcaagtcgggaggttcgctaaaacgcctcgcgttcttagaataccggataagccttctatatctgatttgcttgctattgggcgcggtaatgattcctacgatgaaaataaaaacggcttgcttgttctcgatgagtgcggtacttggtttaatacccgttcttggaatgataaggaaagacagccgattattgattggtttctacatgctcgtaaattaggatgggatattatttttcttgttcaggacttatctattgttgataaacaggcgcgttctgcattagctgaacatgttgtttattgtcgtcgtctggacagaattactttaccttttgtcggtactttatattctcttattactggctcgaaaatgcctctgcctaaattacatgttggcgttgttaaatatggcgattctcaattaagccctactgttgagcgttggctttatactggtaagaatttgtataacgcatatgatactaaacaggctttttctagtaattatgattccggtgtttattcttatttaacgccttatttatcacacggtcggtatttcaaaccattaaatttaggtcagaagatgaaattaactaaaatatatttgaaaaagttttctcgcgttctttgtcttgcgattggatttgcatcagcatttacatatagttatataacccaacctaagccggaggttaaaaaggtagtctctcagacctatgattttgataaattcactattgactcttctcagcgtcttaatctaagctatcgctatgttttcaaggattctaagggaaaattaattaatagcgacgatttacagaagcaaggttattcactcacatatattgatttatgtactgtttccattaaaaaaggtaattcaaatgaaattgttaaatgtaattaattttgttttcttgatgtttgtttcatcatcttcttttgctcaggtaattgaaatgaataattcgcctctgcgcgattttgtaacttggtattcaaagcaatcaggcgaatccgttattgtttctcccgatgtaaaaggtactgttactgtatattcatctgacgttaaacctgaaaatctacgcaatttctttatttctgttttacgtgcaaataattttgatatggtaggttctaacccttccattattcagaagtataatccaaacaatcaggattatattgatgaattgccatcatctgataatcaggaatatgatgataattccgctccttctggtggtttctttgttccgcaaaatgataatgttactcaaacttttaaaattaataacgttcgggcaaaggatttaatacgagttgtcgaattgtttgtaaagtctaatacttctaaatcctcaaatgtattatctattgacggctctaatctattagttgttagtgctcctaaagatattttagataaccttcctcaattcctttcaactgttgatttgccaactgaccagatattgattgagggtttgatatttgaggttcagcaaggtgatgctttagatttttcatttgctgctggctctcagcgtggcactgttgcaggcggtgttaatactgaccgcctcacctctgttttatcttctgctggtggttcgttcggtatttttaatggcgatgttttagggctatcagttcgcgcattaaagactaatagccattcaaaaatattgtctgtgccacgtattcttacgctttcaggtcagaagggttctatctctgttggccagaatgtcccttttattactggtcgtgtgactggtgaatctgccaatgtaaataatccatttcagacgattgagcgtcaaaatgtaggtatttccatgagcgtttttcctgttgcaatggctggcggtaatattgttctggatattaccagcaaggccgatagtttgagttcttctactcaggcaagtgatgttattactaatcaaagaagtattgctacaacggttaatttgcgtgatggacagactcttttactcggtggcctcactgattataaaaacacttctcaggattctggcgtaccgttcctgtctaaaatccctttaatcggcctcctgtttagctcccgctctgattctaacgaggaaagcacgttatacgtgctcgtcaaagcaaccatagtacgcgccctgtagcggcgcattaagcgcggcgggtgtggtggttacgcgcagcgtgaccgctacacttgccagcgccctagcgcccgctcctttcgctttcttcccttcctttctcgccacgttcgccggctttccccgtcaagctctaaatcgggggctccctttagggttccgatttagtgctttacggcacctcgaccccaaaaaacttgatttgggtgatggttcacgtagtgggccatcgccctgatagacggtttttcgccctttgacgttggagtccacgttctttaatagtggactcttgttccaaactggaacaacactcaaccctatctcgggctattcttttgatttataagggattttgccgatttcggaaccaccatcaaacaggattttcgcctgctggggcaaaccagcgtggaccgcttgctgcaactctctcagggccaggcggtgaagggcaatcagctgttgcccgtctcactggtgaaaagaaaaaccaccctggcgcccaatacgcaaaccgcctctccccgcgcgttggccgattcattaatgcagctggcacgacaggtttcccgactggaaagcgggcagtgagcgcaacgcaattaatgtgagttagctcactcattaggcaccccaggctttacactttatgcttccggctcgtatgttgtgtggaattgtgagcggataacaatttcacacaggaaacagctatgaccatgattacgaattcgagctcggtacccggggatcctcaactgtgaggaggctcacggacgcgaagaacaggcacgcgtgctggcagaaacccccggtatgaccgtgaaaacggcccgccgcattctggccgcagcaccacagagtgcacaggcgcgcagtgacactgcgctggatcgtctgatgcagggggcaccggcaccgctggctgcaggtaacccggcatctgatgccgttaacgatttgctgaacacaccagtgtaagggatgtttatgacgagcaaagaaacctttacccattaccagccgcagggcaacagtgacccggctcataccgcaaccgcgcccggcggattgagtgcgaaagcgcctgcaatgaccccgctgatgctggacacctccagccgtaagctggttgcgtgggatggcaccaccgacggtgctgccgttggcattcttgcggttgctgctgaccagaccagcaccacgctgacgttctacaagtccggcacgttccgttatgaggatgtgctctggccggaggctgccagcgacgagacgaaaaaacggaccgcgtttgccggaacggcaatcagcatcgtttaactttacccttcatcactaaaggccgcctgtgcggctttttttacgggatttttttatgtcgatgtacacaaccgcccaactgctggcggcaaatgagcagaaatttaagtttgatccgctgtttctgcgtctctttttccgtgagagctatcccttcaccacggagaaagtctatctctcacaaattccgggactggtaaacatggcgctgtacgtttcgccgattgtttccggtgaggttatccgttcccgtggcggctccacctctgaaagcttggcactggccgtcgttttacaacgtcgtgactgggaaaaccctggcgttacccaacttaatcgccttgcagcacatccccctttcgccagctggcgtaatagcgaagaggcccgcaccgatcgcccttcccaacagttgcgcagcctgaatggcgaatggcgctttgcctggtttccggcaccagaagcggtgccggaaagctggctggagtgcgatcttcctgaggccgatactgtcgtcgtcccctcaaactggcagatgcacggttacgatgcgcccatctacaccaacgtgacctatcccattacggtcaatccgccgtttgttcccacggagaatccgacgggttgttactcgctcacatttaatgttgatgaaagctggctacaggaaggccagacgcgaattatttttgatggcgttcctattggttaaaaaatgagctgatttaacaaaaatttaatgcgaattttaacaaaatattaacgtttacaatttaaatatttgcttatacaatcttcctgtttttggggcttttctgattatcaaccggggtacatatgattgacatgctagttttacgattaccgttcatcgattctcttgtttgctccagactctca

SEQ ID NO: 2 - DNA, 7249 bp, Artificial sequence
  artificial DNA molecule for generation of DNA nanostructure
tgatagacggtttttcgccctttgacgttggagtccacgttctttaatagtggactcttgttccaaactggaacaacactcaaccctatctcgggctattcttttgatttataagggattttgccgatttcggaaccaccatcaaacaggattttcgcctgctggggcaaaccagcgtggaccgcttgctgcaactctctcagggccaggcggtgaagggcaatcagctgttgcccgtctcactggtgaaaagaaaaaccaccctggcgcccaatacgcaaaccgcctctccccgcgcgttggccgattcattaatgcagctggcacgacaggtttcccgactggaaagcgggcagtgagcgcaacgcaattaatgtgagttagctcactcattaggcaccccaggctttacactttatgcttccggctcgtatgttgtgtggaattgtgagcggataacaatttcacacaggaaacagctatgaccatgattacgaattcgagctcggtacccggggatcctctagagtcgacctgcaggcatgcaagcttggcactggccgtcgttttacaacgtcgtgactgggaaaaccctggcgttacccaacttaatcgccttgcagcacatccccctttcgccagctggcgtaatagcgaagaggcccgcaccgatcgcccttcccaacagttgcgcagcctgaatggcgaatggcgctttgcctggtttccggcaccagaagcggtgccggaaagctggctggagtgcgatcttcctgaggccgatactgtcgtcgtcccctcaaactggcagatgcacggttacgatgcgcccatctacaccaacgtgacctatcccattacggtcaatccgccgtttgttcccacggagaatccgacgggttgttactcgctcacatttaatgttgatgaaagctggctacaggaaggccagacgcgaattatttttgatggcgttcctattggttaaaaaatgagctgatttaacaaaaatttaatgcgaattttaacaaaatattaacgtttacaatttaaatatttgcttatacaatcttcctgtttttggggcttttctgattatcaaccggggtacatatgattgacatgctagttttacgattaccgttcatcgattctcttgtttgctccagactctcaggcaatgacctgatagcctttgtagatctctcaaaaatagctaccctctccggcattaatttatcagctagaacggttgaatatcatattgatggtgatttgactgtctccggcctttctcacccttttgaatctttacctacacattactcaggcattgcatttaaaatatatgagggttctaaaaatttttatccttgcgttgaaataaaggcttctcccgcaaaagtattacagggtcataatgtttttggtacaaccgatttagctttatgctctgaggctttattgcttaattttgctaattctttgccttgcctgtatgatttattggatgttaatgctactactattagtagaattgatgccaccttttcagctcgcgccccaaatgaaaatatagctaaacaggttattgaccatttgcgaaatgtatctaatggtcaaactaaatctactcgttcgcagaattgggaatcaactgttatatggaatgaaacttccagacaccgtactttagttgcatatttaaaacatgttgagctacagcattatattcagcaattaagctctaagccatccgcaaaaatgacctcttatcaaaaggagcaattaaaggtactctctaatcctgacctgttggagtttgcttccggtctggttcgctttgaagctcgaattaaaacgcgatatttgaagtctttcgggcttcctcttaatctttttgatgcaatccgctttgcttctgactataatagtcagggtaaagacctgatttttgatttatggtcattctcgttttctgaactgtttaaagcatttgagggggattcaatgaatatttatgacgattccgcagtattggacgctatccagtctaaacattttactattaccccctctggcaaaacttcttttgcaaaagcctctcgctattttggtttttatcgtcgtctggtaaacgagggttatgatagtgttgctcttactatgcctcgtaattccttttggcgttatgtatctgcattagttgaatgtggtattcctaaatctcaactgatgaatctttctacctgtaataatgttgttccgttagttcgttttattaacgtagatttttcttcccaacgtcctgactggtataatgagccagttcttaaaatcgcataaggtaattcacaatgattaaagttgaaattaaaccatctcaagcccaatttactactcgttctggtgtttctcgtcagggcaagccttattcactgaatgagcagctttgttacgttgatttgggtaatgaatatccggttcttgtcaagattactcttgatgaaggtcagccagcctatgcgcctggtctgtacaccgttcatctgtcctctttcaaagttggtcagttcggttcccttatgattgaccgtctgcgcctcgttccggctaagtaacatggagcaggtcgcggatttcgacacaatttatcaggcgatgatacaaatctccgttgtactttgtttcgcgcttggtataatcgctgggggtcaaagatgagtgttttagtgtattcttttgcctctttcgttttaggttggtgccttcgtagtggcattacgtattttacccgtttaatggaaacttcctcatgaaaaagtctttagtcctcaaagcctctgtagccgttgctaccctcgttccgatgctgtctttcgctgctgagggtgacgatcccgcaaaagcggcctttaactccctgcaagcctcagcgaccgaatatatcggttatgcgtgggcgatggttgttgtcattgtcggcgcaactatcggtatcaagctgtttaagaaattcacctcgaaagcaagctgataaaccgatacaattaaaggctccttttggagccttttttttggagattttcaacgtgaaaaaattattattcgcaattcctttagttgttcctttctattctcactccgctgaaactgttgaaagttgtttagcaaaatcccatacagaaaattcatttactaacgtctggaaagacgacaaaactttagatcgttacgctaactatgagggctgtctgtggaatgctacaggcgttgtagtttgtactggtgacgaaactcagtgttacggtacatgggttcctattgggcttgctatccctgaaaatgagggtggtggctctgagggtggcggttctgagggtggcggttctgagggtggcggtactaaacctcctgagtacggtgatacacctattccgggctatacttatatcaaccctctcgacggcacttatccgcctggtactgagcaaaaccccgctaatcctaatccttctcttgaggagtctcagcctcttaatactttcatgtttcagaataataggttccgaaataggcagggggcattaactgtttatacgggcactgttactcaaggcactgaccccgttaaaacttattaccagtacactcctgtatcatcaaaagccatgtatgacgcttactggaacggtaaattcagagactgcgctttccattctggctttaatgaggatttatttgtttgtgaatatcaaggccaatcgtctgacctgcctcaacctcctgtcaatgctggcggcggctctggtggtggttctggtggcggctctgagggtggtggctctgagggtggcggttctgagggtggcggctctgagggaggcggttccggtggtggctctggttccggtgattttgattatgaaaagatggcaaacgctaataagggggctatgaccgaaaatgccgatgaaaacgcgctacagtctgacgctaaaggcaaacttgattctgtcgctactgattacggtgctgctatcgatggtttcattggtgacgtttccggccttgctaatggtaatggtgctactggtgattttgctggctctaattcccaaatggctcaagtcggtgacggtgataattcacctttaatgaataatttccgtcaatatttaccttccctccctcaatcggttgaatgtcgcccttttgtctttggcgctggtaaaccatatgaattttctattgattgtgacaaaataaacttattccgtggtgtctttgcgtttcttttatatgttgccacctttatgtatgtattttctacgtttgctaacatactgcgtaataaggagtcttaatcatgccagttcttttgggtattccgttattattgcgtttcctcggtttccttctggtaactttgttcggctatctgcttacttttcttaaaaagggcttcggtaagatagctattgctatttcattgtttcttgctcttattattgggcttaactcaattcttgtgggttatctctctgatattagcgctcaattaccctctgactttgttcagggtgttcagttaattctcccgtctaatgcgcttccctgtttttatgttattctctctgtaaaggctgctattttcatttttgacgttaaacaaaaaatcgtttcttatttggattgggataaataatatggctgtttattttgtaactggcaaattaggctctggaaagacgctcgttagcgttggtaagattcaggataaaattgtagctgggtgcaaaatagcaactaatcttgatttaaggcttcaaaacctcccgcaagtcgggaggttcgctaaaacgcctcgcgttcttagaataccggataagccttctatatctgatttgcttgctattgggcgcggtaatgattcctacgatgaaaataaaaacggcttgcttgttctcgatgagtgcggtacttggtttaatacccgttcttggaatgataaggaaagacagccgattattgattggtttctacatgctcgtaaattaggatgggatattatttttcttgttcaggacttatctattgttgataaacaggcgcgttctgcattagctgaacatgttgtttattgtcgtcgtctggacagaattactttaccttttgtcggtactttatattctcttattactggctcgaaaatgcctctgcctaaattacatgttggcgttgttaaatatggcgattctcaattaagccctactgttgagcgttggctttatactggtaagaatttgtataacgcatatgatactaaacaggctttttctagtaattatgattccggtgtttattcttatttaacgccttatttatcacacggtcggtatttcaaaccattaaatttaggtcagaagatgaaattaactaaaatatatttgaaaaagttttctcgcgttctttgtcttgcgattggatttgcatcagcatttacatatagttatataacccaacctaagccggaggttaaaaaggtagtctctcagacctatgattttgataaattcactattgactcttctcagcgtcttaatctaagctatcgctatgttttcaaggattctaagggaaaattaattaatagcgacgatttacagaagcaaggttattcactcacatatattgatttatgtactgtttccattaaaaaaggtaattcaaatgaaattgttaaatgtaattaattttgttttcttgatgtttgtttcatcatcttcttttgctcaggtaattgaaatgaataattcgcctctgcgcgattttgtaacttggtattcaaagcaatcaggcgaatccgttattgtttctcccgatgtaaaaggtactgttactgtatattcatctgacgttaaacctgaaaatctacgcaatttctttatttctgttttacgtgcaaataattttgatatggtaggttctaacccttccattattcagaagtataatccaaacaatcaggattatattgatgaattgccatcatctgataatcaggaatatgatgataattccgctccttctggtggtttctttgttccgcaaaatgataatgttactcaaacttttaaaattaataacgttcgggcaaaggatttaatacgagttgtcgaattgtttgtaaagtctaatacttctaaatcctcaaatgtattatctattgacggctctaatctattagttgttagtgctcctaaagatattttagataaccttcctcaattcctttcaactgttgatttgccaactgaccagatattgattgagggtttgatatttgaggttcagcaaggtgatgctttagatttttcatttgctgctggctctcagcgtggcactgttgcaggcggtgttaatactgaccgcctcacctctgttttatcttctgctggtggttcgttcggtatttttaatggcgatgttttagggctatcagttcgcgcattaaagactaatagccattcaaaaatattgtctgtgccacgtattcttacgctttcaggtcagaagggttctatctctgttggccagaatgtcccttttattactggtcgtgtgactggtgaatctgccaatgtaaataatccatttcagacgattgagcgtcaaaatgtaggtatttccatgagcgtttttcctgttgcaatggctggcggtaatattgttctggatattaccagcaaggccgatagtttgagttcttctactcaggcaagtgatgttattactaatcaaagaagtattgctacaacggttaatttgcgtgatggacagactcttttactcggtggcctcactgattataaaaacacttctcaggattctggcgtaccgttcctgtctaaaatccctttaatcggcctcctgtttagctcccgctctgattctaacgaggaaagcacgttatacgtgctcgtcaaagcaaccatagtacgcgccctgtagcggcgcattaagcgcggcgggtgtggtggttacgcgcagcgtgaccgctacacttgccagcgccctagcgcccgctcctttcgctttcttcccttcctttctcgccacgttcgccggctttccccgtcaagctctaaatcgggggctccctttagggttccgatttagtgctttacggcacctcgaccccaaaaaacttgatttgggtgatggttcacgtagtgggccatcgccc

SEQ ID NO: 3 - DNA, 44 bp, Artificial sequence
  artificial DNA molecule for generation of DNA nanostructure
tttgggaatattcacaaacacaaagttacaaagacagaagcgca

SEQ ID NO: 4 - DNA, 48 bp, Artificial sequence
  artificial DNA molecule for generation of DNA nanostructure
caggcaagtttcattccatataacgtacggtgaacaaccctcaacatt

SEQ ID NO: 5 - DNA, 41 bp, Artificial sequence
  artificial DNA molecule for generation of DNA nanostructure
tgtcgtctttccagacgttagtaaaacgattggccttgatt

SEQ ID NO: 6 - DNA, 38 bp, Artificial sequence
  artificial DNA molecule for generation of DNA nanostructure
gtcggattataacctatgtttaccagtcccggaatttg

SEQ ID NO: 7 - DNA, 48 bp, Artificial sequence
  artificial DNA molecule for generation of DNA nanostructure
ttaaacggacctaaaacgaaaggaacgagggggagtgtactggtaata

SEQ ID NO: 8 - DNA, 39 bp, Artificial sequence
  artificial DNA molecule for generation of DNA nanostructure
gcagaaccaccaccagagccgcctttcaacaactaaagg

SEQ ID NO: 9 - DNA, 39 bp, Artificial sequence
  artificial DNA molecule for generation of DNA nanostructure
atcgcactagcgagttctggaagatcaacgtaacaaagc

SEQ ID NO: 10 - DNA, 45 bp, Artificial sequence
  artificial DNA molecule for generation of DNA nanostructure
agaggacaggaaccgacccagcgaacactaaaaacgagggtagca

SEQ ID NO: 11 - DNA, 30 bp, Artificial sequence
  artificial DNA molecule for generation of DNA nanostructure
tgaattttccaccctccatcgccccaaaag

SEQ ID NO: 12 - DNA, 38 bp, Artificial sequence
  artificial DNA molecule for generation of DNA nanostructure
cactacgattacccaaagtaagcgtcatacatgaattt

SEQ ID NO: 13 - DNA, 48 bp, Artificial sequence
  artificial DNA molecule for generation of DNA nanostructure
tttttcacctgtatgggattttgctaaacaacgccagcattggaaagc

SEQ ID NO: 14 - DNA, 32 bp, Artificial sequence
  artificial DNA molecule for generation of DNA nanostructure
cggccagagcgcctgtgcactctgatcagatg

SEQ ID NO: 15 - DNA, 48 bp, Artificial sequence
  artificial DNA molecule for generation of DNA nanostructure
aggcaccagtaaaatactttgaggtgcagggagttaaaggcgaaacgt

SEQ ID NO: 16 - DNA, 41 bp, Artificial sequence
  artificial DNA molecule for generation of DNA nanostructure
ttaggattagcggcgcagacggtcaagtaacagcgcatagg

SEQ ID NO: 17 - DNA, 31 bp, Artificial sequence
  artificial DNA molecule for generation of DNA nanostructure
aaggaacagtttcagcggagtgaccagccag

SEQ ID NO: 18 - DNA, 48 bp, Artificial sequence
  artificial DNA molecule for generation of DNA nanostructure
gagatggtttaatttcggtcaggaataatgcttagtttgaccattaga

SEQ ID NO: 19 - DNA, 48 bp, Artificial sequence
  artificial DNA molecule for generation of DNA nanostructure
ccgatatattcggtcgaattgcgaagtttccagatgatacaggagaga

SEQ ID NO: 20 - DNA, 53 bp, Artificial sequence
  artificial DNA molecule for generation of DNA nanostructure
ggaattaagtttaaagaaacgccagaaggaaaccgagaccggaacagagccag

SEQ ID NO: 21 - DNA, 47 bp, Artificial sequence
  artificial DNA molecule for generation of DNA nanostructure
ggtttctgccagcacgcgtgcctgggaggtttaaacagtcctttaca

SEQ ID NO: 22 - DNA, 40 bp, Artificial sequence
  artificial DNA molecule for generation of DNA nanostructure
cagtgaattaaatatgcaactaaaagttgatttatcggcc

SEQ ID NO: 23 - DNA, 40 bp, Artificial sequence
  artificial DNA molecule for generation of DNA nanostructure
gaaaaggtaaaacattatgaccctgtaatacttttgcggg

SEQ ID NO: 24 - DNA, 47 bp, Artificial sequence
  artificial DNA molecule for generation of DNA nanostructure
tttaacgtcaaaatacgaacctcccgacttgcgttcttcgcgtccgt

SEQ ID NO: 25 - DNA, 48 bp, Artificial sequence
  artificial DNA molecule for generation of DNA nanostructure
ctgaggctactaaagactttttcagccgaggcaaaagaatttatacca

SEQ ID NO: 26 - DNA, 47 bp, Artificial sequence
  artificial DNA molecule for generation of DNA nanostructure
cacgacaagaaccggatatgtcagtgccttgatcataaggatgaacg

SEQ ID NO: 27 - DNA, 45 bp, Artificial sequence
  artificial DNA molecule for generation of DNA nanostructure
cgcagtgtatttttgtattttgttaaaattactttgaacaagagt

SEQ ID NO: 28 - DNA, 39 bp, Artificial sequence
  artificial DNA molecule for generation of DNA nanostructure
aacggaacctccggccagagcacctttgaccactgacca

SEQ ID NO: 29 - DNA, 38 bp, Artificial sequence
  artificial DNA molecule for generation of DNA nanostructure
ctccatgttacttatgaaaaaaaaaggctcacgcataa

SEQ ID NO: 30 - DNA, 32 bp, Artificial sequence
  artificial DNA molecule for generation of DNA nanostructure
gcatcagacgatccagtgctcattagctttca

SEQ ID NO: 31 - DNA, 48 bp, Artificial sequence
  artificial DNA molecule for generation of DNA nanostructure
caccgcttctggtgccggaaaccaatagtagttgcgaacgagtagatt

SEQ ID NO: 32 - DNA, 45 bp, Artificial sequence
  artificial DNA molecule for generation of DNA nanostructure
gaggggacgaacaaacacatgtttaaggcttgccctgacgagaaa

SEQ ID NO: 33 - DNA, 38 bp, Artificial sequence
  artificial DNA molecule for generation of DNA nanostructure
aaatcaccggaaccagagccaccgaaacgcaataataa

SEQ ID NO: 34 - DNA, 39 bp, Artificial sequence
  artificial DNA molecule for generation of DNA nanostructure
ccgccacgggaacggctccgtgggacgacagcccaattc

SEQ ID NO: 35 - DNA, 39 bp, Artificial sequence
  artificial DNA molecule for generation of DNA nanostructure
caccggaaacaatcggatcctcataaatgtgcgcattaa

SEQ ID NO: 36 - DNA, 31 bp, Artificial sequence
  artificial DNA molecule for generation of DNA nanostructure
ccgcttttcgtaatgcgaatagaaccgttcc

SEQ ID NO: 37 - DNA, 27 bp, Artificial sequence
  artificial DNA molecule for generation of DNA nanostructure
cagcgaaagacagcatcggacactcat

SEQ ID NO: 38 - DNA, 32 bp, Artificial sequence
  artificial DNA molecule for generation of DNA nanostructure
acggctacagagggcgggatcgtcaccctcag

SEQ ID NO: 39 - DNA, 40 bp, Artificial sequence
  artificial DNA molecule for generation of DNA nanostructure
cgcctccctcagagccgccacccttagccgaaaataaatc

SEQ ID NO: 40 - DNA, 48 bp, Artificial sequence
  artificial DNA molecule for generation of DNA nanostructure
ttttgctcgttgaaaatctccggaataataatagccagaatgacagga

SEQ ID NO: 41 - DNA, 53 bp, Artificial sequence
  artificial DNA molecule for generation of DNA nanostructure
ttaagcaataaagcatccaataaatcatactttccggtcaggaagacagcgcc

SEQ ID NO: 42 - DNA, 47 bp, Artificial sequence
  artificial DNA molecule for generation of DNA nanostructure
ccaccctcagagccaccaccctcgctaatatgcagtctctggctttt

SEQ ID NO: 43 - DNA, 30 bp, Artificial sequence
  artificial DNA molecule for generation of DNA nanostructure
ctgtaaataccaagttttagttaataacct

SEQ ID NO: 44 - DNA, 48 bp, Artificial sequence
  artificial DNA molecule for generation of DNA nanostructure
tctgacctaaatttaaagagtcaaaattactataaaagtttgagtgaa

SEQ ID NO: 45 - DNA, 48 bp, Artificial sequence
  artificial DNA molecule for generation of DNA nanostructure
tggtttgataagaataaacaccggcaaccaacgctcaacaatttaggc

SEQ ID NO: 46 - DNA, 31 bp, Artificial sequence
  artificial DNA molecule for generation of DNA nanostructure
taaataagtatcatattagcttaattaaatc

SEQ ID NO: 47 - DNA, 32 bp, Artificial sequence
  artificial DNA molecule for generation of DNA nanostructure
tgtgtgaaattgttatcatcgagagggttgat

SEQ ID NO: 48 - DNA, 40 bp, Artificial sequence
  artificial DNA molecule for generation of DNA nanostructure
acaagcaaaccagcgccaaagacaaggtaaatccgtaaca

SEQ ID NO: 49 - DNA, 40 bp, Artificial sequence
  artificial DNA molecule for generation of DNA nanostructure
accttgctgaacctcaaatatcaatttagacattgaggat

SEQ ID NO: 50 - DNA, 38 bp, Artificial sequence
  artificial DNA molecule for generation of DNA nanostructure
agccagcagcaaatgaaaaatctaagtgtttttataat

SEQ ID NO: 51 - DNA, 39 bp, Artificial sequence
  artificial DNA molecule for generation of DNA nanostructure
tcagcttgctttcgagcctgataaagcccggagtattaa

SEQ ID NO: 52 - DNA, 39 bp, Artificial sequence
  artificial DNA molecule for generation of DNA nanostructure
agcctttaattgtatgaggtttacccatgtaattgacgg

SEQ ID NO: 53 - DNA, 38 bp, Artificial sequence
  artificial DNA molecule for generation of DNA nanostructure
acgacgacaataaaaatgagactacctttttttcatct

SEQ ID NO: 54 - DNA, 39 bp, Artificial sequence
  artificial DNA molecule for generation of DNA nanostructure
attgtgtcagatttgtatcatcgacaacgccaatagata

SEQ ID NO: 55 - DNA, 40 bp, Artificial sequence
  artificial DNA molecule for generation of DNA nanostructure
acaagaaattatcaacaacatgtagtagggctcatattta

SEQ ID NO: 56 - DNA, 41 bp, Artificial sequence
  artificial DNA molecule for generation of DNA nanostructure
ctaccatatcaagctaatgcagaacggagcggacgagcatg

SEQ ID NO: 57 - DNA, 47 bp, Artificial sequence
  artificial DNA molecule for generation of DNA nanostructure
aattccttatcattccaagaaaccaccagaagcgcctgtaataatat

SEQ ID NO: 58 - DNA, 39 bp, Artificial sequence
  artificial DNA molecule for generation of DNA nanostructure
aatggaattgaggaaggttatcttagaatcccgctgaga

SEQ ID NO: 59 - DNA, 48 bp, Artificial sequence
  artificial DNA molecule for generation of DNA nanostructure
caaattctctgtttaggcgttaaaaataccgaccgtgtgagtgaattt

SEQ ID NO: 60 - DNA, 38 bp, Artificial sequence
  artificial DNA molecule for generation of DNA nanostructure
gcgttatagggtattactttgcccgaacgttaactcgt

SEQ ID NO: 61 - DNA, 48 bp, Artificial sequence
  artificial DNA molecule for generation of DNA nanostructure
gaaaaagctaccagtataaagcatgttcaaataagaacattatcattt

SEQ ID NO: 62 - DNA, 32 bp, Artificial sequence
  artificial DNA molecule for generation of DNA nanostructure
aaagtgtaacacaacatacgagcccgggtacc

SEQ ID NO: 63 - DNA, 48 bp, Artificial sequence
  artificial DNA molecule for generation of DNA nanostructure
ttatcaaacgtcgctattaattaattttccctaaaatatcttacaaac

SEQ ID NO: 64 - DNA, 31 bp, Artificial sequence
  artificial DNA molecule for generation of DNA nanostructure
gattaagattgaaaacatagcgagtacaaac

SEQ ID NO: 65 - DNA, 39 bp, Artificial sequence
  artificial DNA molecule for generation of DNA nanostructure
cgtcaccaaataggtacattcaaaaccaagtaccgcact

SEQ ID NO: 66 - DNA, 45 bp, Artificial sequence
  artificial DNA molecule for generation of DNA nanostructure
aataggaagtaccgcctatggtttgccgtttttattttcatcgta

SEQ ID NO: 67 - DNA, 41 bp, Artificial sequence
  artificial DNA molecule for generation of DNA nanostructure
tatatgtgagtgaataaccttgcttattagagccgtcagag

SEQ ID NO: 68 - DNA, 47 bp, Artificial sequence
  artificial DNA molecule for generation of DNA nanostructure
acattaattgcgttgcgctcactttggaacacatattcctggcgaga

SEQ ID NO: 69 - DNA, 48 bp, Artificial sequence
  artificial DNA molecule for generation of DNA nanostructure
ctgtagcattccacagacagccctatgaaaccaaattattcattaaag

SEQ ID NO: 70 - DNA, 38 bp, Artificial sequence
  artificial DNA molecule for generation of DNA nanostructure
gtactcagcggtttagcttgataccgatagttgcgccg

SEQ ID NO: 71 - DNA, 48 bp, Artificial sequence
  artificial DNA molecule for generation of DNA nanostructure
agcgacagccgattgagggagggaaaagggcggtatcaccataagtat

SEQ ID NO: 72 - DNA, 40 bp, Artificial sequence
  artificial DNA molecule for generation of DNA nanostructure
ttagcaagcccttattagcgtttgccatcttttcataatc

SEQ ID NO: 73 - DNA, 44 bp, Artificial sequence
  artificial DNA molecule for generation of DNA nanostructure
gccaacaatagataatacatggaacggtcaaactatgagcgggc

SEQ ID NO: 74 - DNA, 48 bp, Artificial sequence
  artificial DNA molecule for generation of DNA nanostructure
caaatcagatatagaacaaacgtaatcaataggtgaattatcaccgtc

SEQ ID NO: 75 - DNA, 53 bp, Artificial sequence
  artificial DNA molecule for generation of DNA nanostructure
agcagctggtaatgaagaactacgccagaatcctgagaaagcatcatagaacc

SEQ ID NO: 76 - DNA, 45 bp, Artificial sequence
  artificial DNA molecule for generation of DNA nanostructure
ccgctcacgaggctgattctgaaacatgaaagtcctgaaatcggc

SEQ ID NO: 77 - DNA, 47 bp, Artificial sequence
  artificial DNA molecule for generation of DNA nanostructure
agcttgacggggaaaatgagtgttgttccagtgcccgctttccagtc

SEQ ID NO: 78 - DNA, 48 bp, Artificial sequence
  artificial DNA molecule for generation of DNA nanostructure
tatttgcaatcataggtctgacattagtgaatattagacttttaggag

SEQ ID NO: 79 - DNA, 53 bp, Artificial sequence
  artificial DNA molecule for generation of DNA nanostructure
gcgtcagactgtacagcaccgtaatcagttacaacgcctgagtttcttaaaca

SEQ ID NO: 80 - DNA, 47 bp, Artificial sequence
  artificial DNA molecule for generation of DNA nanostructure
tcaatatctggtcagttggcaaacgcgcttaaattcgacattaattt

SEQ ID NO: 81 - DNA, 32 bp, Artificial sequence
  artificial DNA molecule for generation of DNA nanostructure
tatgagcctcaatccgccgggcgctaatgaat

SEQ ID NO: 82 - DNA, 47 bp, Artificial sequence
  artificial DNA molecule for generation of DNA nanostructure
taaccctcgtttacgaaactggctcattatacacatcccttacactg

SEQ ID NO: 83 - DNA, 31 bp, Artificial sequence
  artificial DNA molecule for generation of DNA nanostructure
ttgggtaagatgtgctgcaaggccaaaatta

SEQ ID NO: 84 - DNA, 48 bp, Artificial sequence
  artificial DNA molecule for generation of DNA nanostructure
atagctctcacggaaattttcccaggttgtgtaatcgtaaaactaagc

SEQ ID NO: 85 - DNA, 48 bp, Artificial sequence
  artificial DNA molecule for generation of DNA nanostructure
cgcacaggataaaaaatttctgctcagaaacagcggatcaatgcaaat

SEQ ID NO: 86 - DNA, 45 bp, Artificial sequence
  artificial DNA molecule for generation of DNA nanostructure
acctgagcgagaaacattgcaacacggtccacgctggtttgcccc

SEQ ID NO: 87 - DNA, 48 bp, Artificial sequence
  artificial DNA molecule for generation of DNA nanostructure
acatcgaccggcctttagtgaggtctggtcgcaatgcatgtcaatcat

SEQ ID NO: 88 - DNA, 38 bp, Artificial sequence
  artificial DNA molecule for generation of DNA nanostructure
gaagcctttatttcaacgcaaggccgaaagacttcaaa

SEQ ID NO: 89 - DNA, 48 bp, Artificial sequence
  artificial DNA molecule for generation of DNA nanostructure
aagagacgcatttgccgccagcaggcttgaagggtaaagtggtccgtt

SEQ ID NO: 90 - DNA, 38 bp, Artificial sequence
  artificial DNA molecule for generation of DNA nanostructure
aacgtcagcgtggtttgccaagctttcagagtgaaggg

SEQ ID NO: 91 - DNA, 40 bp, Artificial sequence
  artificial DNA molecule for generation of DNA nanostructure
gtggcacatattaacaccgcctgcaacagtgccacgctga

SEQ ID NO: 92 - DNA, 30 bp, Artificial sequence
  artificial DNA molecule for generation of DNA nanostructure
gtgcgggccgttggtgtctccgtgggtgga

SEQ ID NO: 93 - DNA, 39 bp, Artificial sequence
  artificial DNA molecule for generation of DNA nanostructure
aaaggtaataagagaatataaagccgttccggcaccgtc

SEQ ID NO: 94 - DNA, 48 bp, Artificial sequence
  artificial DNA molecule for generation of DNA nanostructure
gttccgaaatcggcaaaatacttcatattacccacacgaccagtaata

SEQ ID NO: 95 - DNA, 48 bp, Artificial sequence
  artificial DNA molecule for generation of DNA nanostructure
taacaatttcatttgaattaccttggctattatggcagattcaccagt

SEQ ID NO: 96 - DNA, 32 bp, Artificial sequence
  artificial DNA molecule for generation of DNA nanostructure
gcgccagggtggttttagagagttgattttca

SEQ ID NO: 97 - DNA, 46 bp, Artificial sequence
  artificial DNA molecule for generation of DNA nanostructure
tcttttcacttctgataatcctgattgtttggtggtgcgcaggcgc

SEQ ID NO: 98 - DNA, 40 bp, Artificial sequence
  artificial DNA molecule for generation of DNA nanostructure
catcccaccaacggcagcaaacgctaaacgatgctgattg

SEQ ID NO: 99 - DNA, 39 bp, Artificial sequence
  artificial DNA molecule for generation of DNA nanostructure
acgggcaacagtgataatcagaaaagaatgcgcaaccag

SEQ ID NO: 100 - DNA, 38 bp, Artificial sequence
  artificial DNA molecule for generation of DNA nanostructure
gtaccttttatataaaagacaaagaacgcgagaaaact

SEQ ID NO: 101 - DNA, 39 bp, Artificial sequence
  artificial DNA molecule for generation of DNA nanostructure
caagaaaagaatataacattttgtcaccgcctggccctg

SEQ ID NO: 102 - DNA, 38 bp, Artificial sequence
  artificial DNA molecule for generation of DNA nanostructure
aaaaaagcattgccctaaacaagagaatcgactgagag

SEQ ID NO: 103 - DNA, 41 bp, Artificial sequence
  artificial DNA molecule for generation of DNA nanostructure
aaccaataggaacagcagcaaccgcaagccccatgtccagc

SEQ ID NO: 104 - DNA, 44 bp, Artificial sequence
  artificial DNA molecule for generation of DNA nanostructure
ggtcaatgccggagagggtagcatcaaatttttgcgagaagttt

SEQ ID NO: 105 - DNA, 40 bp, Artificial sequence
  artificial DNA molecule for generation of DNA nanostructure
ttttagaaccctcatatattttaaagcggattgctatttt

SEQ ID NO: 106 - DNA, 40 bp, Artificial sequence
  artificial DNA molecule for generation of DNA nanostructure
gcagcaagggaaaaacgctcatggaatggattatgatgaa

SEQ ID NO: 107 - DNA, 48 bp, Artificial sequence
  artificial DNA molecule for generation of DNA nanostructure
cctaaaacacgctcaatcgtctgaaaatacctcagtaacaggtttaac

SEQ ID NO: 108 - DNA, 53 bp, Artificial sequence
  artificial DNA molecule for generation of DNA nanostructure
caccaagagcttaagaggtcaaagattaagaggaagcataaaaatctgtttag

SEQ ID NO: 109 - DNA, 39 bp, Artificial sequence
  artificial DNA molecule for generation of DNA nanostructure
ctatatgtaaatgctgtaccgacagtcagatggattata

SEQ ID NO: 110 - DNA, 41 bp, Artificial sequence
  artificial DNA molecule for generation of DNA nanostructure
gcgcaactgttgggaagggcgatcgctgataaattaataac

SEQ ID NO: 111 - DNA, 39 bp, Artificial sequence
  artificial DNA molecule for generation of DNA nanostructure
atcgaaaggccggagacagtcaagaaaggggcgccaggg

SEQ ID NO: 112 - DNA, 48 bp, Artificial sequence
  artificial DNA molecule for generation of DNA nanostructure
gttgtaaactcttcgctattacgccagctggcatcaccatgctatcag

SEQ ID NO: 113 - DNA, 31 bp, Artificial sequence
  artificial DNA molecule for generation of DNA nanostructure
aacttaaaatcccgtagattaagtctggagc

SEQ ID NO: 114 - DNA, 47 bp, Artificial sequence
  artificial DNA molecule for generation of DNA nanostructure
aaaggtttctttgctcgtcataacagtcaggaagattgtaaaaccaa

SEQ ID NO: 115 - DNA, 39 bp, Artificial sequence
  artificial DNA molecule for generation of DNA nanostructure
cggcttaggttgggttacatcggaaaagaagatttacat

SEQ ID NO: 116 - DNA, 48 bp, Artificial sequence
  artificial DNA molecule for generation of DNA nanostructure
catcaaaaacgacggccagtgggcgtcacgacctacaaagcaatatga

SEQ ID NO: 117 - DNA, 53 bp, Artificial sequence
  artificial DNA molecule for generation of DNA nanostructure
cgaacgaaccacctgcgcgaactgatagcattacattacaaacatccaatcgc

SEQ ID NO: 118 - DNA, 47 bp, Artificial sequence
  artificial DNA molecule for generation of DNA nanostructure
cctgagtaatgtgtaggtaaagagaatcgtcgtcattgctgaacggt

SEQ ID NO: 119 - DNA, 50 bp, Artificial sequence
  artificial DNA molecule for generation of DNA nanostructure
gtgtacagaccctattttttttggaacctattagactcctcaagagaagg

SEQ ID NO: 120 - DNA, 50 bp, Artificial sequence
  artificial DNA molecule for generation of DNA nanostructure
gccggaaacgtcaccacatagttagcaagcccacaatgatttttaacaac

SEQ ID NO: 121 - DNA, 48 bp, Artificial sequence
  artificial DNA molecule for generation of DNA nanostructure
caaaatcaccagtttttagcaccattaccaaccgatttttttgagcca

SEQ ID NO: 122 - DNA, 40 bp, Artificial sequence
  artificial DNA molecule for generation of DNA nanostructure
agcgcgaaacaaagtttttacaacgggaaatccgcgacct

SEQ ID NO: 123 - DNA, 44 bp, Artificial sequence
  artificial DNA molecule for generation of DNA nanostructure
cgcgaggctttttttttagccgcgcccaatagcaagacatataa

SEQ ID NO: 124 - DNA, 40 bp, Artificial sequence
  artificial DNA molecule for generation of DNA nanostructure
aaaattcaaccctcagaatttttcgccaccctccacggaa

SEQ ID NO: 125 - DNA, 50 bp, Artificial sequence
  artificial DNA molecule for generation of DNA nanostructure
agagccaccaccctcattttttttcagggatagcgtaacgatctaaagtt

SEQ ID NO: 126 - DNA, 44 bp, Artificial sequence
  artificial DNA molecule for generation of DNA nanostructure
gtttccgagcttttttgaattaatgccccctgcaggtgcccgta

SEQ ID NO: 127 - DNA, 36 bp, Artificial sequence
  artificial DNA molecule for generation of DNA nanostructure
ggaatacccaaaagaaatacataatttttggtggca

SEQ ID NO: 128 - DNA, 46 bp, Artificial sequence
  artificial DNA molecule for generation of DNA nanostructure
ttttttttttcacagaaaatacctggcatgattaagactcatagcc

SEQ ID NO: 129 - DNA, 48 bp, Artificial sequence
  artificial DNA molecule for generation of DNA nanostructure
aaaacaggcagaaccgagtaccaggtttttggataagtgccgtcgaga

SEQ ID NO: 130 - DNA, 40 bp, Artificial sequence
  artificial DNA molecule for generation of DNA nanostructure
catatgaaaatagcagtcgtaatcatggtttttcatagct

SEQ ID NO: 131 - DNA, 48 bp, Artificial sequence
  artificial DNA molecule for generation of DNA nanostructure
agcgaaagctttgaatcgtaaaacatttttaaataaagaaattgcgta

SEQ ID NO: 132 - DNA, 50 bp, Artificial sequence
  artificial DNA molecule for generation of DNA nanostructure
cccatcctaatatggcatttttttcatcaataataatggaagggttagaa

SEQ ID NO: 133 - DNA, 50 bp, Artificial sequence
  artificial DNA molecule for generation of DNA nanostructure
acaaaatcgcgcagaggtttttgaattattcagaaacagtacataaatca

SEQ ID NO: 134 - DNA, 48 bp, Artificial sequence
  artificial DNA molecule for generation of DNA nanostructure
cttctgacctgatttttagcgtaagaatacaaaggtttttacattctg

SEQ ID NO: 135 - DNA, 50 bp, Artificial sequence
  artificial DNA molecule for generation of DNA nanostructure
gacaatatttttgaatttttaatgtttcaattttttcaattttttatatt

SEQ ID NO: 136 - DNA, 40 bp, Artificial sequence
  artificial DNA molecule for generation of DNA nanostructure
agaggcattttcgatttttccagtaaagtaattctgtcca

SEQ ID NO: 137 - DNA, 40 bp, Artificial sequence
  artificial DNA molecule for generation of DNA nanostructure
gccagccaataacggatttttttgcctgattgcggccttg

SEQ ID NO: 138 - DNA, 46 bp, Artificial sequence
  artificial DNA molecule for generation of DNA nanostructure
atcctttttgaacatttgattaaaaagagtctgtccatgcggtcag

SEQ ID NO: 139 - DNA, 44 bp, Artificial sequence
  artificial DNA molecule for generation of DNA nanostructure
tattggcggcctttttacgctgattatcagatgttaattatcat

SEQ ID NO: 140 - DNA, 40 bp, Artificial sequence
  artificial DNA molecule for generation of DNA nanostructure
gcgaagccggcgaacggcggggagaggctttttgtttgcg

SEQ ID NO: 141 - DNA, 36 bp, Artificial sequence
  artificial DNA molecule for generation of DNA nanostructure
agtgaggccaccgagtgtaataacttttttcacttg

SEQ ID NO: 142 - DNA, 44 bp, Artificial sequence
  artificial DNA molecule for generation of DNA nanostructure
tagcccgatttttatagggtatcctgtttgatggtgcctgagta

SEQ ID NO: 143 - DNA, 40 bp, Artificial sequence
  artificial DNA molecule for generation of DNA nanostructure
gaaccagacgacgatatgcagccagcggtttttgccggtg

SEQ ID NO: 144 - DNA, 48 bp, Artificial sequence
  artificial DNA molecule for generation of DNA nanostructure
ctatattttcatttttttggggcgcgagcttacatttttttcgcaaat

SEQ ID NO: 145 - DNA, 40 bp, Artificial sequence
  artificial DNA molecule for generation of DNA nanostructure
ttttcgtctcgtcgttttttggcagcgtgccggacttgta

SEQ ID NO: 146 - DNA, 44 bp, Artificial sequence
  artificial DNA molecule for generation of DNA nanostructure
cttatgcgtttttttttaaggtagtaaattgggcttttttgata

SEQ ID NO: 147 - DNA, 50 bp, Artificial sequence
  artificial DNA molecule for generation of DNA nanostructure
ggcatcaattctactaggcaaagcgccagttttgagagatttttagactt

SEQ ID NO: 148 - DNA, 50 bp, Artificial sequence
  artificial DNA molecule for generation of DNA nanostructure
tagatgggcgcatcgtatttttccgtgcatctgccattcgccattcaggc

SEQ ID NO: 149 - DNA, 40 bp, Artificial sequence
  artificial DNA molecule for generation of DNA nanostructure
gtagctcaggcggattgatttttcgtaatggggatggctt

SEQ ID NO: 150 - DNA, 46 bp, Artificial sequence
  artificial DNA molecule for generation of DNA nanostructure
attgttttttgaatttagagagagcttcaaagcgaaccttgtacca

SEQ ID NO: 151 - DNA, 44 bp, Artificial sequence
  artificial DNA molecule for generation of DNA nanostructure
ccccctccgggttttttaccataagcaaatattaggaaaacagg

SEQ ID NO: 152 - DNA, 36 bp, Artificial sequence
  artificial DNA molecule for generation of DNA nanostructure
atcgcgttttaattcgtacctttatttttttgctcc

SEQ ID NO: 153 - DNA, 48 bp, Artificial sequence
  artificial DNA molecule for generation of DNA nanostructure
tttgcaaaataggtcaataattcgcttttttctggccttcctgtagcc

SEQ ID NO: 154 - DNA, 50 bp, Artificial sequence
  artificial DNA molecule for generation of DNA nanostructure
cttacggctggtaaattttttttaaacgttaattaaatcagctcattttt

SEQ ID NO: 155 - DNA, 43 bp, Artificial sequence
  artificial DNA molecule for generation of DNA nanostructure
ttgtgaattactgtgttcagcaaatcgttaacggctggtgctg

SEQ ID NO: 156 - DNA, 43 bp, Artificial sequence
  artificial DNA molecule for generation of DNA nanostructure
agcattaacctcagagcataaagctaaatcggagaccggaagc

SEQ ID NO: 157 - DNA, 44 bp, Artificial sequence
  artificial DNA molecule for generation of DNA nanostructure
aatctttgcatgcggcgggccgttttcacggtccaaaataaaca

SEQ ID NO: 158 - DNA, 22 bp, Artificial sequence
  artificial DNA molecule for generation of DNA nanostructure
gccatattattcaaagtcagag

SEQ ID NO: 159 - DNA, 22 bp, Artificial sequence
  artificial DNA molecule for generation of DNA nanostructure
aaactccaacaaactttaatca

SEQ ID NO: 160 - DNA, 38 bp, Artificial sequence
  artificial DNA molecule for generation of DNA nanostructure
ggtaattgagcagagccgccaccaaagaattagcaaaa

SEQ ID NO: 161 - DNA, 44 bp, Artificial sequence
  artificial DNA molecule for generation of DNA nanostructure
tgaatcttaccaagccagttaataccgggctggctgaccttcat

SEQ ID NO: 162 - DNA, 45 bp, Artificial sequence
  artificial DNA molecule for generation of DNA nanostructure
cctttttaaactgaacttaagccccacccagctacaattttatcc

SEQ ID NO: 163 - DNA, 43 bp, Artificial sequence
  artificial DNA molecule for generation of DNA nanostructure
gagaattagaaaaggctatcttaccgaagccagagagataacc

SEQ ID NO: 164 - DNA, 45 bp, Artificial sequence
  artificial DNA molecule for generation of DNA nanostructure
tgaaatagcaatataagcagacagaaccgggttgaggcaggtcag

SEQ ID NO: 165 - DNA, 45 bp, Artificial sequence
  artificial DNA molecule for generation of DNA nanostructure
tcaagattagttgattttttgttagacggataacatactcattaa

SEQ ID NO: 166 - DNA, 44 bp, Artificial sequence
  artificial DNA molecule for generation of DNA nanostructure
cacaagaattgagaccctgaatatcccaaagttttaacgggtca

SEQ ID NO: 167 - DNA, 43 bp, Artificial sequence
  artificial DNA molecule for generation of DNA nanostructure
tccaaatctaatttcgctaacgagcgtcttttgaagccttaaa

SEQ ID NO: 168 - DNA, 45 bp, Artificial sequence
  artificial DNA molecule for generation of DNA nanostructure
tccagagcaagaaacgctattttgaataataagagcaagaaacaa

SEQ ID NO: 169 - DNA, 43 bp, Artificial sequence
  artificial DNA molecule for generation of DNA nanostructure
tattctaagaaagcctcctcacagttgaggatcccggaagcat

SEQ ID NO: 170 - DNA, 22 bp, Artificial sequence
  artificial DNA molecule for generation of DNA nanostructure
taaagcactaatgcgcgtaacc

SEQ ID NO: 171 - DNA, 22 bp, Artificial sequence
  artificial DNA molecule for generation of DNA nanostructure
cagtatgttagggcttatccgg

SEQ ID NO: 172 - DNA, 38 bp, Artificial sequence
  artificial DNA molecule for generation of DNA nanostructure
accacacccgctcaacagttgaaacaagtttgccttta

SEQ ID NO: 173 - DNA, 44 bp, Artificial sequence
  artificial DNA molecule for generation of DNA nanostructure
tgtctttccaagcctggggtgcctaatgagtgatcgaggtgccg

SEQ ID NO: 174 - DNA, 43 bp, Artificial sequence
  artificial DNA molecule for generation of DNA nanostructure
atcgataggcgcgttttcatcggcattttcggtccttattacg

SEQ ID NO: 175 - DNA, 45 bp, Artificial sequence
  artificial DNA molecule for generation of DNA nanostructure
aaagaacgtggaccgatttaggctagggcgggaagaattagaagt

SEQ ID NO: 176 - DNA, 45 bp, Artificial sequence
  artificial DNA molecule for generation of DNA nanostructure
aacaggagagtgtagcggttgcttcaaagggcgaaaaaccgtcta

SEQ ID NO: 177 - DNA, 43 bp, Artificial sequence
  artificial DNA molecule for generation of DNA nanostructure
gctggcagccgattatcagagcgggagctaatgcgccgctaca

SEQ ID NO: 178 - DNA, 45 bp, Artificial sequence
  artificial DNA molecule for generation of DNA nanostructure
cacccaaaggagcccctccaacgttgacgagcacgtataacgtgc

SEQ ID NO: 179 - DNA, 44 bp, Artificial sequence
  artificial DNA molecule for generation of DNA nanostructure
tcagggcgatggcttttgggggctaactctagaaaccaatcaat

SEQ ID NO: 180 - DNA, 44 bp, Artificial sequence
  artificial DNA molecule for generation of DNA nanostructure
gggcgcgtactatggtcacgcatcggaactgcggaacaaagaac

SEQ ID NO: 181 - DNA, 45 bp, Artificial sequence
  artificial DNA molecule for generation of DNA nanostructure
tttcctcgttagaaaagggataccctcaacactaacaactaatag

SEQ ID NO: 182 - DNA, 43 bp, Artificial sequence
  artificial DNA molecule for generation of DNA nanostructure
cctaaagtcaagttccactacgtgaaccatagagtccactatt

SEQ ID NO: 183 - DNA, 38 bp, Artificial sequence
  artificial DNA molecule for generation of DNA nanostructure
ccaatactgcgttcaaaagggtgagccattaaaaatac

SEQ ID NO: 184 - DNA, 22 bp, Artificial sequence
  artificial DNA molecule for generation of DNA nanostructure
cgccaaaaggactggatagcgt

SEQ ID NO: 185 - DNA, 51 bp, Artificial sequence
  artificial DNA molecule for generation of DNA nanostructure
ccagtgagtttcgcacgggtcactgttgccctgcggctggcagatacataa

SEQ ID NO: 186 - DNA, 43 bp, Artificial sequence
  artificial DNA molecule for generation of DNA nanostructure
gtctttaaagcagaagataaaacagaggtgagcacgcaaatta

SEQ ID NO: 187 - DNA, 43 bp, Artificial sequence
  artificial DNA molecule for generation of DNA nanostructure
aatcaaaagaaggaaacctgtcgtgccagctgcatggttgcgg

SEQ ID NO: 188 - DNA, 22 bp, Artificial sequence
  artificial DNA molecule for generation of DNA nanostructure
accgttgtagcaatcccttata

SEQ ID NO: 189 - DNA, 45 bp, Artificial sequence
  artificial DNA molecule for generation of DNA nanostructure
ctgactattagtaaaaatgctttaactaacggaacaacattatta

SEQ ID NO: 190 - DNA, 44 bp, Artificial sequence
  artificial DNA molecule for generation of DNA nanostructure
gaatccccctcaatgtttagaattacgagatgtaccccggtctg

SEQ ID NO: 191 - DNA, 44 bp, Artificial sequence
  artificial DNA molecule for generation of DNA nanostructure
caggtagaaagataactaatgtaatgggtatcagcggggtcatt

SEQ ID NO: 192 - DNA, 43 bp, Artificial sequence
  artificial DNA molecule for generation of DNA nanostructure
ggggtaatatagtcaaatcaggtctttaccataaatattcatt

SEQ ID NO: 193 - DNA, 43 bp, Artificial sequence
  artificial DNA molecule for generation of DNA nanostructure
gcatagtcacattctcatcagttgagatttacgttgggaagaa

SEQ ID NO: 194 - DNA, 45 bp, Artificial sequence
  artificial DNA molecule for generation of DNA nanostructure
aaatctacgttaacactatcatgccagaggagaggcttgagagat

SEQ ID NO: 195 - DNA, 45 bp, Artificial sequence
  artificial DNA molecule for generation of DNA nanostructure
aggaatacaagagcaataaaacgaaacagttcagaaaacgagaat

SEQ ID NO: 196 - DNA, 45 bp, Artificial sequence
  artificial DNA molecule for generation of DNA nanostructure
gaccataaatcaaagaagcaaatgcaatgtattcaaccgttctag

SEQ ID NO: 197 - DNA, 47 bp, Artificial sequence
  artificial DNA molecule for generation of DNA nanostructure
tgatataagtatagccaaccaatacaaagaattaattaatattttgt

SEQ ID NO: 198 - DNA, 48 bp, Artificial sequence
  artificial DNA molecule for generation of DNA nanostructure
ggaaaccacggtgcgggcctcttcagcccaatgtataagcaaaagccc

SEQ ID NO: 199 - DNA, 34 bp, Artificial sequence
  artificial DNA molecule for generation of DNA nanostructure
gctattactaaaattcgcattgctttaaacagtt

SEQ ID NO: 200 - DNA, 34 bp, Artificial sequence
  artificial DNA molecule for generation of DNA nanostructure
ccatgtttacatagctatcttacaggaaacaatg

SEQ ID NO: 201 - DNA, 47 bp, Artificial sequence
  artificial DNA molecule for generation of DNA nanostructure
gccaccgccaccctcagagagcccaataatacgaggaaagtgtatca

SEQ ID NO: 202 - DNA, 47 bp, Artificial sequence
  artificial DNA molecule for generation of DNA nanostructure
cgccaccctcagaaccggaatagcgcaataataggactgtagcgcgt

SEQ ID NO: 203 - DNA, 32 bp, Artificial sequence
  artificial DNA molecule for generation of DNA nanostructure
aatacccaacggaatacaagatagcagcaccg

SEQ ID NO: 204 - DNA, 39 bp, Artificial sequence
  artificial DNA molecule for generation of DNA nanostructure
agtgtaccccggttgctgctccaattttcagggatagca

SEQ ID NO: 205 - DNA, 48 bp, Artificial sequence
  artificial DNA molecule for generation of DNA nanostructure
cttattacgtggcaacatataaaacatatggtcagagagacgagcgtc

SEQ ID NO: 206 - DNA, 39 bp, Artificial sequence
  artificial DNA molecule for generation of DNA nanostructure
tgttacttagccgcattagacggaagacaccaaagaact

SEQ ID NO: 207 - DNA, 48 bp, Artificial sequence
  artificial DNA molecule for generation of DNA nanostructure
ttaatgccagaatcgagaatataaacggtgtaccaactttgaaagagg

SEQ ID NO: 208 - DNA, 40 bp, Artificial sequence
  artificial DNA molecule for generation of DNA nanostructure
aaaacgacggccagtgaatcaataaaatagcactaatatc

SEQ ID NO: 209 - DNA, 47 bp, Artificial sequence
  artificial DNA molecule for generation of DNA nanostructure
gcagacggtcaatcattccgcgacataatcagaaatatttctcagag

SEQ ID NO: 210 - DNA, 32 bp, Artificial sequence
  artificial DNA molecule for generation of DNA nanostructure
aaaatagcaaagtcagaggagaaaactttttc

SEQ ID NO: 211 - DNA, 47 bp, Artificial sequence
  artificial DNA molecule for generation of DNA nanostructure
agcccgaggaagattaggaacccataaattgtgtcgaaaaagggaac

SEQ ID NO: 212 - DNA, 47 bp, Artificial sequence
  artificial DNA molecule for generation of DNA nanostructure
ggcgattatggcgaaagggggatgaataaatttttgttaaatcaaaa

SEQ ID NO: 213 - DNA, 42 bp, Artificial sequence
  artificial DNA molecule for generation of DNA nanostructure
gccgaacaaagttaccagtaagactcagagagatactgaaca

SEQ ID NO: 214 - DNA, 39 bp, Artificial sequence
  artificial DNA molecule for generation of DNA nanostructure
gcctttagcgtcacaaaggataaaaatttttagaaccct

SEQ ID NO: 215 - DNA, 47 bp, Artificial sequence
  artificial DNA molecule for generation of DNA nanostructure
tcaagtttggcatgataaggaaacagagcaagtttagtacacgttgt

SEQ ID NO: 216 - DNA, 31 bp, Artificial sequence
  artificial DNA molecule for generation of DNA nanostructure
aataaagcaaattgtaaacgcggccaccctc

SEQ ID NO: 217 - DNA, 48 bp, Artificial sequence
  artificial DNA molecule for generation of DNA nanostructure
caaaatcaaacgtcacagaaaattgaaacgcagagaattaaacccaca

SEQ ID NO: 218 - DNA, 39 bp, Artificial sequence
  artificial DNA molecule for generation of DNA nanostructure
ttttgtcaggatatcaggtcattgcctgagaacccagct

SEQ ID NO: 219 - DNA, 40 bp, Artificial sequence
  artificial DNA molecule for generation of DNA nanostructure
ccagtagcaccgtcaccgacttgaaacgctaaataacata

SEQ ID NO: 220 - DNA, 47 bp, Artificial sequence
  artificial DNA molecule for generation of DNA nanostructure
tgggttatatggaaacagtacataccaagctttcagaggtggagccg

SEQ ID NO: 221 - DNA, 39 bp, Artificial sequence
  artificial DNA molecule for generation of DNA nanostructure
tgtcaatcatatttaaacgaggcacaattttttagttgc

SEQ ID NO: 222 - DNA, 32 bp, Artificial sequence
  artificial DNA molecule for generation of DNA nanostructure
agaacgcgaggcgttttagcgaacggcagagg

SEQ ID NO: 223 - DNA, 39 bp, Artificial sequence
  artificial DNA molecule for generation of DNA nanostructure
aaacattcaaaaacatgaacggtcgaactgacagaccag

SEQ ID NO: 224 - DNA, 40 bp, Artificial sequence
  artificial DNA molecule for generation of DNA nanostructure
gtctggagaactagcagacagtcatgtaatacttttgagg

SEQ ID NO: 225 - DNA, 47 bp, Artificial sequence
  artificial DNA molecule for generation of DNA nanostructure
aatcgtaacaaacaagggagagggtagctatttttgagaaggccgga

SEQ ID NO: 226 - DNA, 47 bp, Artificial sequence
  artificial DNA molecule for generation of DNA nanostructure
cttgcgggaggttttgaagccttaaaaagcctaaaacagggaagcgg

SEQ ID NO: 227 - DNA, 42 bp, Artificial sequence
  artificial DNA molecule for generation of DNA nanostructure
tttaatggagccagtaataagagagtattctaaacagccata

SEQ ID NO: 228 - DNA, 40 bp, Artificial sequence
  artificial DNA molecule for generation of DNA nanostructure
tattttgcaccttcatcaagagtagcgcataggctggctg

SEQ ID NO: 229 - DNA, 48 bp, Artificial sequence
  artificial DNA molecule for generation of DNA nanostructure
caatgaaaccatcaagggtgagaagatctacaaaggcattagagccag

SEQ ID NO: 230 - DNA, 48 bp, Artificial sequence
  artificial DNA molecule for generation of DNA nanostructure
caaaaatgcattttcgtttgaaataccgaccggcttaggtattgagcg

SEQ ID NO: 231 - DNA, 30 bp, Artificial sequence
  artificial DNA molecule for generation of DNA nanostructure
catatattaatcagtagcgaggaaccgcct

SEQ ID NO: 232 - DNA, 40 bp, Artificial sequence
  artificial DNA molecule for generation of DNA nanostructure
acccccagcgattatattacccaaattcatcaacagatga

SEQ ID NO: 233 - DNA, 34 bp, Artificial sequence
  artificial DNA molecule for generation of DNA nanostructure
agcctttatttcaacgcaaattaagctaaagatt

SEQ ID NO: 234 - DNA, 38 bp, Artificial sequence
  artificial DNA molecule for generation of DNA nanostructure
atcatacaggcaaggggaacgccatcagctcatttttt

SEQ ID NO: 235 - DNA, 34 bp, Artificial sequence
  artificial DNA molecule for generation of DNA nanostructure
tttaaatgcaatgcctgagtaatgtgtcgggaga

SEQ ID NO: 236 - DNA, 46 bp, Artificial sequence
  artificial DNA molecule for generation of DNA nanostructure
atataaagtatttttcgacaaaagttcatttttcttctgacctaaa

SEQ ID NO: 237 - DNA, 46 bp, Artificial sequence
  artificial DNA molecule for generation of DNA nanostructure
ttaaaggtgccaaagacaaaagggctttttacattcaaccgattga

SEQ ID NO: 238 - DNA, 38 bp, Artificial sequence
  artificial DNA molecule for generation of DNA nanostructure
aggtaaatattgtttttcggaaattattcatgccagtt

SEQ ID NO: 239 - DNA, 38 bp, Artificial sequence
  artificial DNA molecule for generation of DNA nanostructure
gagagggtccgtactcaggcgaagccctttttttttaa

SEQ ID NO: 240 - DNA, 44 bp, Artificial sequence
  artificial DNA molecule for generation of DNA nanostructure
cagtcccggaatttgtttttgagagatagactttacgtacagcg

SEQ ID NO: 241 - DNA, 52 bp, Artificial sequence
  artificial DNA molecule for generation of DNA nanostructure
ttatttatcccccaatagcaagcaaatcagatttttttagaaggcttatccg

SEQ ID NO: 242 - DNA, 52 bp, Artificial sequence
  artificial DNA molecule for generation of DNA nanostructure
gctaatgcagaacgcgcatcaagaaaacacaagactttttaagaacgcggta

SEQ ID NO: 243 - DNA, 43 bp, Artificial sequence
  artificial DNA molecule for generation of DNA nanostructure
ccacgggatttcatttgatttttttaccttttttaataactat

SEQ ID NO: 244 - DNA, 46 bp, Artificial sequence
  artificial DNA molecule for generation of DNA nanostructure
tttcatcggcattttttttcggaccagagcctttttccacccagaa

SEQ ID NO: 245 - DNA, 46 bp, Artificial sequence
  artificial DNA molecule for generation of DNA nanostructure
ttaccagcgaattatcaccattactattcacaatttttcaaataaa

SEQ ID NO: 246 - DNA, 46 bp, Artificial sequence
  artificial DNA molecule for generation of DNA nanostructure
aaatatcaataagaaacgattttttttttgtttaacgtacaaaata

SEQ ID NO: 247 - DNA, 50 bp, Artificial sequence
  artificial DNA molecule for generation of DNA nanostructure
agccgccgcaggtcagacgattggctttttttgacattagcaaggccgga

SEQ ID NO: 248 - DNA, 35 bp, Artificial sequence
  artificial DNA molecule for generation of DNA nanostructure
aacgtagaaaatttttacatacataaaggcagtat

SEQ ID NO: 249 - DNA, 44 bp, Artificial sequence
  artificial DNA molecule for generation of DNA nanostructure
atgtaaattttttctgatgcaaatccaatgttattttagttaat

SEQ ID NO: 250 - DNA, 47 bp, Artificial sequence
  artificial DNA molecule for generation of DNA nanostructure
gctcatggagcaccagcagaagataaaacagaggtgacaaatcaaca

SEQ ID NO: 251 - DNA, 40 bp, Artificial sequence
  artificial DNA molecule for generation of DNA nanostructure
gtaaagtaattctgtcttaccgcgcaatccaacattccaa

SEQ ID NO: 252 - DNA, 42 bp, Artificial sequence
  artificial DNA molecule for generation of DNA nanostructure
ataccgggcacattaattgcgttgtccactatggaaagccgg

SEQ ID NO: 253 - DNA, 40 bp, Artificial sequence
  artificial DNA molecule for generation of DNA nanostructure
tcacccaagagaacaagcaagccgaagtaccgcactcatc

SEQ ID NO: 254 - DNA, 40 bp, Artificial sequence
  artificial DNA molecule for generation of DNA nanostructure
aatgcgcgaagaatacgtggcacagcactaaagcgcgtaa

SEQ ID NO: 255 - DNA, 47 bp, Artificial sequence
  artificial DNA molecule for generation of DNA nanostructure
gccagcgggaggtgtccagcatcaatcccgtaaaaaaagccgcacag

SEQ ID NO: 256 - DNA, 47 bp, Artificial sequence
  artificial DNA molecule for generation of DNA nanostructure
aaacttaaaaagagacgcagaaacgaaaggattaggattatgccgtc

SEQ ID NO: 257 - DNA, 40 bp, Artificial sequence
  artificial DNA molecule for generation of DNA nanostructure
acatcgacataaaaaagcggggtccaggaacgacgtgctt

SEQ ID NO: 258 - DNA, 48 bp, Artificial sequence
  artificial DNA molecule for generation of DNA nanostructure
tcggcgaactccgtggtgaagggaaagatgataacctattgttaatgc

SEQ ID NO: 259 - DNA, 47 bp, Artificial sequence
  artificial DNA molecule for generation of DNA nanostructure
tgattgctttgaatagtacctttccgttgtagccacagtgccacgct

SEQ ID NO: 260 - DNA, 48 bp, Artificial sequence
  artificial DNA molecule for generation of DNA nanostructure
tagtctttattaaaaaaatcgtctttgcaacacgccgctaagaatcag

SEQ ID NO: 261 - DNA, 34 bp, Artificial sequence
  artificial DNA molecule for generation of DNA nanostructure
cggcaaacgcgtacgccagaatcacgattttaga

SEQ ID NO: 262 - DNA, 47 bp, Artificial sequence
  artificial DNA molecule for generation of DNA nanostructure
acgtcgcgcagaggcgaatacaggaggccgacaaattaatacatcgg

SEQ ID NO: 263 - DNA, 52 bp, Artificial sequence
  artificial DNA molecule for generation of DNA nanostructure
ccctcagttttcataccctcagaaaataacagtgcccgcctgaacaattacc

SEQ ID NO: 264 - DNA, 44 bp, Artificial sequence
  artificial DNA molecule for generation of DNA nanostructure
tgagcaaaagtagctctcactcctcaagagaaagtaagcagata

SEQ ID NO: 265 - DNA, 19 bp, Artificial sequence
  artificial DNA molecule for generation of DNA nanostructure
aaccaccaccaggccacca

SEQ ID NO: 266 - DNA, 39 bp, Artificial sequence
  artificial DNA molecule for generation of DNA nanostructure
agaaaaataatccgcgcttaatgggaaaaacattagtaa

SEQ ID NO: 267 - DNA, 47 bp, Artificial sequence
  artificial DNA molecule for generation of DNA nanostructure
atttacgagcatgtagagataagttataaacaattctgaacaccgga

SEQ ID NO: 268 - DNA, 32 bp, Artificial sequence
  artificial DNA molecule for generation of DNA nanostructure
gctggcaagttgctttgactgcactctgtggt

SEQ ID NO: 269 - DNA, 48 bp, Artificial sequence
  artificial DNA molecule for generation of DNA nanostructure
gctagggcagctaactggtttctgccagcacgtacctgcacacgtata

SEQ ID NO: 270 - DNA, 47 bp, Artificial sequence
  artificial DNA molecule for generation of DNA nanostructure
tcagtatttaacatcaccatcacgttaaaggggattcgccgttgtgt

SEQ ID NO: 271 - DNA, 47 bp, Artificial sequence
  artificial DNA molecule for generation of DNA nanostructure
aaaaaccgtctatcagggcgatggccgagctcccaccacacccgatc

SEQ ID NO: 272 - DNA, 39 bp, Artificial sequence
  artificial DNA molecule for generation of DNA nanostructure
ccctcagcccctgccactggtaacaataatcattaaacc

SEQ ID NO: 273 - DNA, 48 bp, Artificial sequence
  artificial DNA molecule for generation of DNA nanostructure
tcctcattaggagtgtgggagggagaacgggtggctgtctttccttat

SEQ ID NO: 274 - DNA, 40 bp, Artificial sequence
  artificial DNA molecule for generation of DNA nanostructure
tggcttttaacggggtaggttgagaccctcagaaccgcca

SEQ ID NO: 275 - DNA, 32 bp, Artificial sequence
  artificial DNA molecule for generation of DNA nanostructure
taaagaacgtggactccaacgtcaaatgagtg

SEQ ID NO: 276 - DNA, 47 bp, Artificial sequence
  artificial DNA molecule for generation of DNA nanostructure
taagttttgatgatacaaagccagaatggaaagcgcagtttgacagg

SEQ ID NO: 277 - DNA, 39 bp, Artificial sequence
  artificial DNA molecule for generation of DNA nanostructure
cagtgccttgagtacccatcctattttgggggtgaacca

SEQ ID NO: 278 - DNA, 48 bp, Artificial sequence
  artificial DNA molecule for generation of DNA nanostructure
taccgaacgaacccgccgccagcactctgaatttacctgaatggctat

SEQ ID NO: 279 - DNA, 39 bp, Artificial sequence
  artificial DNA molecule for generation of DNA nanostructure
ctacattttttgttccagtaagcgtcatacaatcaagtt

SEQ ID NO: 280 - DNA, 31 bp, Artificial sequence
  artificial DNA molecule for generation of DNA nanostructure
atcaaaatacatgaaagtatatatcatttca

SEQ ID NO: 281 - DNA, 28 bp, Artificial sequence
  artificial DNA molecule for generation of DNA nanostructure
aacaccgcctgcaatcagccgccaccag

SEQ ID NO: 282 - DNA, 47 bp, Artificial sequence
  artificial DNA molecule for generation of DNA nanostructure
gttagcatatttcgggaaacaaacctgtttatcaacaataaaccaat

SEQ ID NO: 283 - DNA, 42 bp, Artificial sequence
  artificial DNA molecule for generation of DNA nanostructure
ccgagtaaaagagtctgtcttgcctgtcctcgttcagggcgc

SEQ ID NO: 284 - DNA, 48 bp, Artificial sequence
  artificial DNA molecule for generation of DNA nanostructure
agtagaagatattaccgccagccagaaatggagtcacgcttcggaacc

SEQ ID NO: 285 - DNA, 38 bp, Artificial sequence
  artificial DNA molecule for generation of DNA nanostructure
tcatagcccccttatcggataaggcggggttttgctca

SEQ ID NO: 286 - DNA, 47 bp, Artificial sequence
  artificial DNA molecule for generation of DNA nanostructure
tgaatatacagtaacagtaccaggtagcgtttgcataagaggctgag

SEQ ID NO: 287 - DNA, 44 bp, Artificial sequence
  artificial DNA molecule for generation of DNA nanostructure
ggtccgttttttcgtttttttcgtcgctggcagcattgccgttc

SEQ ID NO: 288 - DNA, 35 bp, Artificial sequence
  artificial DNA molecule for generation of DNA nanostructure
gccttgctggttttttatatccagaacaaactcaa

SEQ ID NO: 289 - DNA, 52 bp, Artificial sequence
  artificial DNA molecule for generation of DNA nanostructure
gcgcggggagaggcgggaatgccaacggctgtcactttttgcgcgcctggag

SEQ ID NO: 290 - DNA, 46 bp, Artificial sequence
  artificial DNA molecule for generation of DNA nanostructure
ttatttacgaaagcgtaactgataatttagaagtttttattagact

SEQ ID NO: 291 - DNA, 43 bp, Artificial sequence
  artificial DNA molecule for generation of DNA nanostructure
gcggccttcccacgcaactttttagcttacggctgtgccggtg

SEQ ID NO: 292 - DNA, 44 bp, Artificial sequence
  artificial DNA molecule for generation of DNA nanostructure
ccccctgcttttttcagacgatccagcggccggccagaatgcgg

SEQ ID NO: 293 - DNA, 46 bp, Artificial sequence
  artificial DNA molecule for generation of DNA nanostructure
gctgcaacaagggaagaaagtttttgaaaggagcgggccttgacgg

SEQ ID NO: 294 - DNA, 50 bp, Artificial sequence
  artificial DNA molecule for generation of DNA nanostructure
ggaattggtcaatagataatacatttttttgagggccctaaaacatcgcc

SEQ ID NO: 295 - DNA, 46 bp, Artificial sequence
  artificial DNA molecule for generation of DNA nanostructure
cgctcactgctttttcgctttccacgggtttttcgttttcacggtc

SEQ ID NO: 296 - DNA, 52 bp, Artificial sequence
  artificial DNA molecule for generation of DNA nanostructure
cgaacgtggcgagatagggttgagtgttgttctttttagtttggaacaagag

SEQ ID NO: 297 - DNA, 38 bp, Artificial sequence
  artificial DNA molecule for generation of DNA nanostructure
acgtcagagagaaacaatactgagaagtgttttttttt

SEQ ID NO: 298 - DNA, 46 bp, Artificial sequence
  artificial DNA molecule for generation of DNA nanostructure
gagagccagcagctttttaatgtatctggtctttttgttggggcgg

SEQ ID NO: 299 - DNA, 46 bp, Artificial sequence
  artificial DNA molecule for generation of DNA nanostructure
tctgacctattggcagattcaccagtttttcacacgaccagtaata

SEQ ID NO: 300 - DNA, 38 bp, Artificial sequence
  artificial DNA molecule for generation of DNA nanostructure
attctggccaactttttgagatagaaccctatttagag

SEQ ID NO: 301 - DNA, 39 bp, Artificial sequence
  artificial DNA molecule for generation of DNA nanostructure
caccttgccctagggttagaaccacggaacgcaaacggc

SEQ ID NO: 302 - DNA, 47 bp, Artificial sequence
  artificial DNA molecule for generation of DNA nanostructure
aactccaaaggtgtttagctatattttcatttggggcgttgtaccaa

SEQ ID NO: 303 - DNA, 34 bp, Artificial sequence
  artificial DNA molecule for generation of DNA nanostructure
cattcgccatgtcataaatattcagcccaatact

SEQ ID NO: 304 - DNA, 39 bp, Artificial sequence
  artificial DNA molecule for generation of DNA nanostructure
cagttcctgattatctttttcttcgtggtgctggtctgg

SEQ ID NO: 305 - DNA, 32 bp, Artificial sequence
  artificial DNA molecule for generation of DNA nanostructure
cgagaaacaccagaacgagtagtacaccaacc

SEQ ID NO: 306 - DNA, 48 bp, Artificial sequence
  artificial DNA molecule for generation of DNA nanostructure
actaatgctaaaacgacgatatattcggtcgcaaaaggctgaggcttt

SEQ ID NO: 307 - DNA, 47 bp, Artificial sequence
  artificial DNA molecule for generation of DNA nanostructure
acccgtcggattctcagccagctgtctttactgatactaatagtagt

SEQ ID NO: 308 - DNA, 40 bp, Artificial sequence
  artificial DNA molecule for generation of DNA nanostructure
agtaacatggagcggattagagccaggaaggttatctaaa

SEQ ID NO: 309 - DNA, 37 bp, Artificial sequence
  artificial DNA molecule for generation of DNA nanostructure
caatcaaaaaaatctaaagcatagattttcaaacaga

SEQ ID NO: 310 - DNA, 39 bp, Artificial sequence
  artificial DNA molecule for generation of DNA nanostructure
aataaagacgtgggaatgccggacttgatgtttagactg

SEQ ID NO: 311 - DNA, 42 bp, Artificial sequence
  artificial DNA molecule for generation of DNA nanostructure
cagaaaacgagaatgaccttgcatcaaagttttgaccagacg

SEQ ID NO: 312 - DNA, 40 bp, Artificial sequence
  artificial DNA molecule for generation of DNA nanostructure
aaaatcagttcatcaacgtctggccttcctgtaattgcgt

SEQ ID NO: 313 - DNA, 31 bp, Artificial sequence
  artificial DNA molecule for generation of DNA nanostructure
caaaccctctgaataatggagacaacgtcag

SEQ ID NO: 314 - DNA, 32 bp, Artificial sequence
  artificial DNA molecule for generation of DNA nanostructure
gtggcatcaattcacctcaaatatatatcttt

SEQ ID NO: 315 - DNA, 40 bp, Artificial sequence
  artificial DNA molecule for generation of DNA nanostructure
ccttatgcggtggttccgaaatcggaaaatcctgtttgat

SEQ ID NO: 316 - DNA, 47 bp, Artificial sequence
  artificial DNA molecule for generation of DNA nanostructure
acgttggtggattgaccgtaatggatattatttgcacgtaaggttta

SEQ ID NO: 317 - DNA, 42 bp, Artificial sequence
  artificial DNA molecule for generation of DNA nanostructure
cgcataacaagaggcaaaagaatatgccctgaacattattac

SEQ ID NO: 318 - DNA, 40 bp, Artificial sequence
  artificial DNA molecule for generation of DNA nanostructure
ggggacgacgacagtaagttagcggcggaatctgcaaaag

SEQ ID NO: 319 - DNA, 48 bp, Artificial sequence
  artificial DNA molecule for generation of DNA nanostructure
aaaagattttcgagcttcaaagcgctccttttaaggaattggaagaaa

SEQ ID NO: 320 - DNA, 47 bp, Artificial sequence
  artificial DNA molecule for generation of DNA nanostructure
actatcgatcctgataaccgcaatttgcgtattgggcgccgcctggc

SEQ ID NO: 321 - DNA, 47 bp, Artificial sequence
  artificial DNA molecule for generation of DNA nanostructure
ctgaaaagaaagcggaataaatcagatagcgtgagtaacaagtttga

SEQ ID NO: 322 - DNA, 32 bp, Artificial sequence
  artificial DNA molecule for generation of DNA nanostructure
agatacataaccaaaatagacagcttgatacc

SEQ ID NO: 323 - DNA, 39 bp, Artificial sequence
  artificial DNA molecule for generation of DNA nanostructure
gttgaaatcaatataaaagaaaccctgagagcagcaggc

SEQ ID NO: 324 - DNA, 40 bp, Artificial sequence
  artificial DNA molecule for generation of DNA nanostructure
gctgattgcccttcaccagggtggagatgatgttatactt

SEQ ID NO: 325 - DNA, 34 bp, Artificial sequence
  artificial DNA molecule for generation of DNA nanostructure
tcctcatataccatatcaaaaatcagtgaggcca

SEQ ID NO: 326 - DNA, 48 bp, Artificial sequence
  artificial DNA molecule for generation of DNA nanostructure
atggtcaataaccagcactaacaactttgcccgaacggttgattccca

SEQ ID NO: 327 - DNA, 40 bp, Artificial sequence
  artificial DNA molecule for generation of DNA nanostructure
aacgagtatgtctggaagtttcatggacgttgacgaggca

SEQ ID NO: 328 - DNA, 40 bp, Artificial sequence
  artificial DNA molecule for generation of DNA nanostructure
gtcgggaaacctgtcgaatagcccgagaaaggccacgctg

SEQ ID NO: 329 - DNA, 47 bp, Artificial sequence
  artificial DNA molecule for generation of DNA nanostructure
ccaaaaggcacagacagccctcattcggcctcaggaagatcgcactc

SEQ ID NO: 330 - DNA, 39 bp, Artificial sequence
  artificial DNA molecule for generation of DNA nanostructure
aggattagacattattaattttaaaagtttggattttaa

SEQ ID NO: 331 - DNA, 47 bp, Artificial sequence
  artificial DNA molecule for generation of DNA nanostructure
cttgagatggtttaatttcaacttcgaaagactagtaagagcaagac

SEQ ID NO: 332 - DNA, 48 bp, Artificial sequence
  artificial DNA molecule for generation of DNA nanostructure
attctgcgtttcgcaatttaattgaaccagaccctcgtttccagaggg

SEQ ID NO: 333 - DNA, 48 bp, Artificial sequence
  artificial DNA molecule for generation of DNA nanostructure
cgatgctgctccggccagagcacatcagcagctgtttggagcaattca

SEQ ID NO: 334 - DNA, 39 bp, Artificial sequence
  artificial DNA molecule for generation of DNA nanostructure
attatcatcatagtcgggcaacagaactggcgtgaatta

SEQ ID NO: 335 - DNA, 39 bp, Artificial sequence
  artificial DNA molecule for generation of DNA nanostructure
ttcaccagtgacactatcataaccggaagcatcagaagc

SEQ ID NO: 336 - DNA, 48 bp, Artificial sequence
  artificial DNA molecule for generation of DNA nanostructure
ttacaaactgcggaacaaagggacgtttgcccagttgcagcaagcggt

SEQ ID NO: 337 - DNA, 47 bp, Artificial sequence
  artificial DNA molecule for generation of DNA nanostructure
caccagaatatcatttaattcgacaactcgtattaaatcctaataga

SEQ ID NO: 338 - DNA, 46 bp, Artificial sequence
  artificial DNA molecule for generation of DNA nanostructure
agcattaacatcctttttataacataaagcttttttaatcggcgag

SEQ ID NO: 339 - DNA, 50 bp, Artificial sequence
  artificial DNA molecule for generation of DNA nanostructure
atgacccaatcaccatcaatatgattttttttcattgaccattagataca

SEQ ID NO: 340 - DNA, 35 bp, Artificial sequence
  artificial DNA molecule for generation of DNA nanostructure
aagacttcaaatttttatcgcgttttaaaagagga

SEQ ID NO: 341 - DNA, 46 bp, Artificial sequence
  artificial DNA molecule for generation of DNA nanostructure
gataagagaagtacgggatttagtaccgttctatttttctgataaa

SEQ ID NO: 342 - DNA, 46 bp, Artificial sequence
  artificial DNA molecule for generation of DNA nanostructure
cactaaaacattttttcatctttggacatttttcaaccatcgccca

SEQ ID NO: 343 - DNA, 46 bp, Artificial sequence
  artificial DNA molecule for generation of DNA nanostructure
tgcaactagtcatttttgcggatggtttttttagagcttaattgct

SEQ ID NO: 344 - DNA, 44 bp, Artificial sequence
  artificial DNA molecule for generation of DNA nanostructure
tcaggctgcgcaacttttttttgggaagggcgatggcaaagcgc

SEQ ID NO: 345 - DNA, 46 bp, Artificial sequence
  artificial DNA molecule for generation of DNA nanostructure
gatagagagttgagatttagtttttaataccacattcaacggaaca

SEQ ID NO: 346 - DNA, 44 bp, Artificial sequence
  artificial DNA molecule for generation of DNA nanostructure
attgtatctttttgtttatcagcttgctcggttgcgccgacaat

SEQ ID NO: 347 - DNA, 38 bp, Artificial sequence
  artificial DNA molecule for generation of DNA nanostructure
tgctgtagctcatttttcatgttttaaataacgaacta

SEQ ID NO: 348 - DNA, 52 bp, Artificial sequence
  artificial DNA molecule for generation of DNA nanostructure
tttgtatcatcgcctgatgtaccgtaacagaggtgtttttatttcttaacga

SEQ ID NO: 349 - DNA, 38 bp, Artificial sequence
  artificial DNA molecule for generation of DNA nanostructure
ataattcgcattaaatgtgattgaatccctttttctca

SEQ ID NO: 350 - DNA, 43 bp, Artificial sequence
  artificial DNA molecule for generation of DNA nanostructure
cagccagcaaactacaactttttcctgtagcattcagccttta

SEQ ID NO: 351 - DNA, 52 bp, Artificial sequence
  artificial DNA molecule for generation of DNA nanostructure
aggtagaaagatcaacgtaacaaagctgctcattttttcagtgaataaggct

SEQ ID NO: 352 - DNA, 22 bp, Artificial sequence
  artificial DNA molecule for generation of DNA nanostructure
acaaagtacaattcctgagttt

SEQ ID NO: 353 - DNA, 51 bp, Artificial sequence
  artificial DNA molecule for generation of DNA nanostructure
cgccaccctcagaagcagttgggtaacgccagggttttccaatagtgaatt

SEQ ID NO: 354 - DNA, 34 bp, Artificial sequence
  artificial DNA molecule for generation of DNA nanostructure
tatcaaaatcataggtctgagaattgagttacca

SEQ ID NO: 355 - DNA, 43 bp, Artificial sequence
  artificial DNA molecule for generation of DNA nanostructure
cgtcaccagtactttccggcaccgcttctggtgcctgctgcaa

SEQ ID NO: 356 - DNA, 50 bp, Artificial sequence
  artificial DNA molecule for generation of DNA nanostructure
taattactagaaatcaagaatcctgaatcttaccgccatttgcaatcaat

SEQ ID NO: 357 - DNA, 35 bp, Artificial sequence
  artificial DNA molecule for generation of DNA nanostructure
atcttgacaagaaccggatattcaccaagcgcgaa

SEQ ID NO: 358 - DNA, 32 bp, Artificial sequence
  artificial DNA molecule for generation of DNA nanostructure
gtataaagccaacagaataaacaccggaatca

SEQ ID NO: 359 - DNA, 45 bp, Artificial sequence
  artificial DNA molecule for generation of DNA nanostructure
gtttagtagttaaatagctcaacaagaatccttgaaaacatagcg

SEQ ID NO: 360 - DNA, 43 bp, Artificial sequence
  artificial DNA molecule for generation of DNA nanostructure
ataaggctcaacatcgccatatgcgttatacaaattcttacca

SEQ ID NO: 361 - DNA, 44 bp, Artificial sequence
  artificial DNA molecule for generation of DNA nanostructure
ccatatttaacaagtaatttactcccgatttccagagcctaatt

SEQ ID NO: 362 - DNA, 44 bp, Artificial sequence
  artificial DNA molecule for generation of DNA nanostructure
agagactatgactgaagacgataaccttgcttctgtaaatcgtc

SEQ ID NO: 363 - DNA, 45 bp, Artificial sequence
  artificial DNA molecule for generation of DNA nanostructure
gctattaattaataacctccgtgtgataaccctgaacagccttta

SEQ ID NO: 364 - DNA, 29 bp, Artificial sequence
  artificial DNA molecule for generation of DNA nanostructure
atagcttagattagaagagtccagtcacg

SEQ ID NO: 365 - DNA, 44 bp, Artificial sequence
  artificial DNA molecule for generation of DNA nanostructure
tatgtgagccttttttttcccttgtagggcttaattgagaatcg

SEQ ID NO: 366 - DNA, 42 bp, Artificial sequence
  artificial DNA molecule for generation of DNA nanostructure
ctggtgtgttcagcaaatcagcgggagctaatatcttctttg

SEQ ID NO: 367 - DNA, 51 bp, Artificial sequence
  artificial DNA molecule for generation of DNA nanostructure
ccaagttacaaaagaaatttctgctcatttgccgccagcacatcccttaca

SEQ ID NO: 368 - DNA, 50 bp, Artificial sequence
  artificial DNA molecule for generation of DNA nanostructure
atccccgggtacccactactcgaggtgccgtaaagacaatattgacgctc

SEQ ID NO: 369 - DNA, 43 bp, Artificial sequence
  artificial DNA molecule for generation of DNA nanostructure
tacatttaacaaacggataacctcaccggaaacaaagcggatc

SEQ ID NO: 370 - DNA, 32 bp, Artificial sequence
  artificial DNA molecule for generation of DNA nanostructure
gaaattgttatccagcctcctcacagttgagg

SEQ ID NO: 371 - DNA, 35 bp, Artificial sequence
  artificial DNA molecule for generation of DNA nanostructure
tttttattttcatcgtaggaatcacagacgacgac

SEQ ID NO: 372 - DNA, 22 bp, Artificial sequence
  artificial DNA molecule for generation of DNA nanostructure
aataaacaacatcgaaattaat

SEQ ID NO: 373 - DNA, 44 bp, Artificial sequence
  artificial DNA molecule for generation of DNA nanostructure
gaagcataaagtggggtgcctaagggcgctaaagggagcccccg

SEQ ID NO: 374 - DNA, 45 bp, Artificial sequence
  artificial DNA molecule for generation of DNA nanostructure
ggttgcggtatgatgccgggtcgtgcctggtactatggtgtagcg

SEQ ID NO: 375 - DNA, 45 bp, Artificial sequence
  artificial DNA molecule for generation of DNA nanostructure
gaattcgtcgtccgtggctcacaaactgttgccctgcggctggta

SEQ ID NO: 376 - DNA, 29 bp, Artificial sequence
  artificial DNA molecule for generation of DNA nanostructure
atgggtaaaggttgtcataaagttgggcg

SEQ ID NO: 377 - DNA, 44 bp, Artificial sequence
  artificial DNA molecule for generation of DNA nanostructure
gttaacggcgcgctctcttttttcgcactcaatccgccgggcgc

SEQ ID NO: 378 - DNA, 44 bp, Artificial sequence
  artificial DNA molecule for generation of DNA nanostructure
attgcaggcatcagagccgggtcttccacacaacatacgagccg

SEQ ID NO: 379 - DNA, 43 bp, Artificial sequence
  artificial DNA molecule for generation of DNA nanostructure
ttcttcgaatcctgtaaagcatggtcatagctgtttcctgtgt

SEQ ID NO: 380 - DNA, 32 bp, Artificial sequence
  artificial DNA molecule for generation of DNA nanostructure
tttgaggactaaaccgcttttgcgggatcgtc

SEQ ID NO: 381 - DNA, 43 bp, Artificial sequence
  artificial DNA molecule for generation of DNA nanostructure
cggtggtgccattagtgatgaagggtaaagttaaagataggtc

SEQ ID NO: 382 - DNA, 42 bp, Artificial sequence
  artificial DNA molecule for generation of DNA nanostructure
gaattgcgaataataatttggtaatagtaaatagtattatag

SEQ ID NO: 383 - DNA, 35 bp, Artificial sequence
  artificial DNA molecule for generation of DNA nanostructure
gtagatgggcgcatcgtaaccgtgaacaactaaag

SEQ ID NO: 384 - DNA, 50 bp, Artificial sequence
  artificial DNA molecule for generation of DNA nanostructure
accctcagcagtaatcatttcattataccagtcatccatataagagtacc

SEQ ID NO: 385 - DNA, 35 bp, Artificial sequence
  artificial DNA molecule for generation of DNA nanostructure
gcaaaatcccttataaatcaaaagtgccagctgca

SEQ ID NO: 386 - DNA, 22 bp, Artificial sequence
  artificial DNA molecule for generation of DNA nanostructure
ttaatgaatcgcagagcaccgt

SEQ ID NO: 387 - DNA, 29 bp, Artificial sequence
  artificial DNA molecule for generation of DNA nanostructure
aacagtttcagcgtagaaaggcatctgcc

SEQ ID NO: 388 - DNA, 44 bp, Artificial sequence
  artificial DNA molecule for generation of DNA nanostructure
tttcacgttaaagaagagtgagttttgtcgtctttccagacgtt

SEQ ID NO: 389 - DNA, 45 bp, Artificial sequence
  artificial DNA molecule for generation of DNA nanostructure
agcatcgggttaaagggactttttggattttgctaaacaactttc

SEQ ID NO: 390 - DNA, 44 bp, Artificial sequence
  artificial DNA molecule for generation of DNA nanostructure
cgggtaaaatacgtacgaaggaattgggaatctacgttaataaa

SEQ ID NO: 391 - DNA, 43 bp, Artificial sequence
  artificial DNA molecule for generation of DNA nanostructure
gcagggaaacccactaatggagggtagcaacggctacagaggc

SEQ ID NO: 392 - DNA, 44 bp, Artificial sequence
  artificial DNA molecule for generation of DNA nanostructure
taacgatctgaaaattctgtatgcatgaggaagtttccattaaa

SEQ ID NO: 393 - DNA, 45 bp, Artificial sequence
  artificial DNA molecule for generation of DNA nanostructure
agtaaatgaatttctccaaaatgaggcttacgataaaaacgccaa

SEQ ID NO: 394 - DNA, 47 bp, Artificial sequence; identical to SEQ ID NO: 197
  artificial DNA molecule for generation of DNA nanostructure

SEQ ID NO: 395 - DNA, 48 bp, Artificial sequence; identical to SEQ ID NO: 198
  artificial DNA molecule for generation of DNA nanostructure

SEQ ID NO: 396 - DNA, 34 bp, Artificial sequence; identical to SEQ ID NO: 199
  artificial DNA molecule for generation of DNA nanostructure

SEQ ID NO: 397 - DNA, 34 bp, Artificial sequence; identical to SEQ ID NO: 200
  artificial DNA molecule for generation of DNA nanostructure

SEQ ID NO: 398 - DNA, 47 bp, Artificial sequence; identical to SEQ ID NO: 201
  artificial DNA molecule for generation of DNA nanostructure

SEQ ID NO: 399 - DNA, 47 bp, Artificial sequence; identical to SEQ ID NO: 202
  artificial DNA molecule for generation of DNA nanostructure

SEQ ID NO: 400 - DNA, 32 bp, Artificial sequence; identical to SEQ ID NO: 203
  artificial DNA molecule for generation of DNA nanostructure

SEQ ID NO: 401 - DNA, 39 bp, Artificial sequence; identical to SEQ ID NO: 204
  artificial DNA molecule for generation of DNA nanostructure

SEQ ID NO: 402 - DNA, 48 bp, Artificial sequence; identical to SEQ ID NO: 205
  artificial DNA molecule for generation of DNA nanostructure

SEQ ID NO: 403 - DNA, 39 bp, Artificial sequence; identical to SEQ ID NO: 206
  artificial DNA molecule for generation of DNA nanostructure

SEQ ID NO: 404 - DNA, 48 bp, Artificial sequence; identical to SEQ ID NO: 207
  artificial DNA molecule for generation of DNA nanostructure

SEQ ID NO: 405 - DNA, 42 bp, Artificial sequence
  artificial DNA molecule for generation of DNA nanostructure
gtaaaacgacggccagtgaatcaataaaatagcactaatatc

SEQ ID NO: 406 - DNA, 47 bp, Artificial sequence; identical to SEQ ID NO: 209
  artificial DNA molecule for generation of DNA nanostructure

SEQ ID NO: 407 - DNA, 32 bp, Artificial sequence; identical to SEQ ID NO: 210
  artificial DNA molecule for generation of DNA nanostructure

SEQ ID NO: 408 - DNA, 47 bp, Artificial sequence; identical to SEQ ID NO: 211
  artificial DNA molecule for generation of DNA nanostructure

SEQ ID NO: 409 - DNA, 44 bp, Artificial sequence
  artificial DNA molecule for generation of DNA nanostructure
gattatggcgaaagggggatgaataaatttttgttaaatcaaaa

SEQ ID NO: 410 - DNA, 42 bp, Artificial sequence; identical to SEQ ID NO: 213
  artificial DNA molecule for generation of DNA nanostructure

SEQ ID NO: 411 - DNA, 39 bp, Artificial sequence; identical to SEQ ID NO: 214
  artificial DNA molecule for generation of DNA nanostructure

SEQ ID NO: 412 - DNA, 45 bp, Artificial sequence
  artificial DNA molecule for generation of DNA nanostructure
tcaagtttggcatgataaggaaacagagcaagtttagtacacgtt

SEQ ID NO: 413 - DNA, 31 bp, Artificial sequence; identical to SEQ ID NO: 216
  artificial DNA molecule for generation of DNA nanostructure

SEQ ID NO: 414 - DNA, 48 bp, Artificial sequence; identical to SEQ ID NO: 217
  artificial DNA molecule for generation of DNA nanostructure

SEQ ID NO: 415 - DNA, 39 bp, Artificial sequence; identical to SEQ ID NO: 218
  artificial DNA molecule for generation of DNA nanostructure

SEQ ID NO: 416 - DNA, 40 bp, Artificial sequence; identical to SEQ ID NO: 219
  artificial DNA molecule for generation of DNA nanostructure

SEQ ID NO: 417 - DNA, 47 bp, Artificial sequence; identical to SEQ ID NO: 220
  artificial DNA molecule for generation of DNA nanostructure

SEQ ID NO: 418 - DNA, 39 bp, Artificial sequence; identical to SEQ ID NO: 221
  artificial DNA molecule for generation of DNA nanostructure

SEQ ID NO: 419 - DNA, 32 bp, Artificial sequence; identical to SEQ ID NO: 222
  artificial DNA molecule for generation of DNA nanostructure

SEQ ID NO: 420 - DNA, 39 bp, Artificial sequence; identical to SEQ ID NO: 223
  artificial DNA molecule for generation of DNA nanostructure

SEQ ID NO: 421 - DNA, 40 bp, Artificial sequence; identical to SEQ ID NO: 224
  artificial DNA molecule for generation of DNA nanostructure

SEQ ID NO: 422 - DNA, 47 bp, Artificial sequence; identical to SEQ ID NO: 225
  artificial DNA molecule for generation of DNA nanostructure

SEQ ID NO: 423 - DNA, 47 bp, Artificial sequence; identical to SEQ ID NO: 226
  artificial DNA molecule for generation of DNA nanostructure

SEQ ID NO: 424 - DNA, 42 bp, Artificial sequence; identical to SEQ ID NO: 227
  artificial DNA molecule for generation of DNA nanostructure

SEQ ID NO: 425 - DNA, 40 bp, Artificial sequence; identical to SEQ ID NO: 228
  artificial DNA molecule for generation of DNA nanostructure

SEQ ID NO: 426 - DNA, 48 bp, Artificial sequence; identical to SEQ ID NO: 229
  artificial DNA molecule for generation of DNA nanostructure

SEQ ID NO: 427 - DNA, 48 bp, Artificial sequence; identical to SEQ ID NO: 230
  artificial DNA molecule for generation of DNA nanostructure

SEQ ID NO: 428 - DNA, 30 bp, Artificial sequence; identical to SEQ ID NO: 231
  artificial DNA molecule for generation of DNA nanostructure

SEQ ID NO: 429 - DNA, 40 bp, Artificial sequence; identical to SEQ ID NO: 232
  artificial DNA molecule for generation of DNA nanostructure

SEQ ID NO: 430 - DNA, 34 bp, Artificial sequence; identical to SEQ ID NO: 233
  artificial DNA molecule for generation of DNA nanostructure

SEQ ID NO: 431 - DNA, 38 bp, Artificial sequence; identical to SEQ ID NO: 234
  artificial DNA molecule for generation of DNA nanostructure

SEQ ID NO: 432 - DNA, 34 bp, Artificial sequence; identical to SEQ ID NO: 235
  artificial DNA molecule for generation of DNA nanostructure

SEQ ID NO: 433 - DNA, 46 bp, Artificial sequence; identical to SEQ ID NO: 236
  artificial DNA molecule for generation of DNA nanostructure

SEQ ID NO: 434 - DNA, 46 bp, Artificial sequence; identical to SEQ ID NO: 237
  artificial DNA molecule for generation of DNA nanostructure

SEQ ID NO: 435 - DNA, 38 bp, Artificial sequence; identical to SEQ ID NO: 238
  artificial DNA molecule for generation of DNA nanostructure

SEQ ID NO: 436 - DNA, 38 bp, Artificial sequence; identical to SEQ ID NO: 239
  artificial DNA molecule for generation of DNA nanostructure

SEQ ID NO: 437 - DNA, 44 bp, Artificial sequence; identical to SEQ ID NO: 240
  artificial DNA molecule for generation of DNA nanostructure

SEQ ID NO: 438 - DNA, 52 bp, Artificial sequence; identical to SEQ ID NO: 241
  artificial DNA molecule for generation of DNA nanostructure

SEQ ID NO: 439 - DNA, 52 bp, Artificial sequence; identical to SEQ ID NO: 242
  artificial DNA molecule for generation of DNA nanostructure

SEQ ID NO: 440 - DNA, 43 bp, Artificial sequence; identical to SEQ ID NO: 243
  artificial DNA molecule for generation of DNA nanostructure

SEQ ID NO: 441 - DNA, 46 bp, Artificial sequence; identical to SEQ ID NO: 244
  artificial DNA molecule for generation of DNA nanostructure

SEQ ID NO: 442 - DNA, 46 bp, Artificial sequence; identical to SEQ ID NO: 245
  artificial DNA molecule for generation of DNA nanostructure

SEQ ID NO: 443 - DNA, 46 bp, Artificial sequence; identical to SEQ ID NO: 246
  artificial DNA molecule for generation of DNA nanostructure

SEQ ID NO: 444 - DNA, 50 bp, Artificial sequence; identical to SEQ ID NO: 247
  artificial DNA molecule for generation of DNA nanostructure

SEQ ID NO: 445 - DNA, 35 bp, Artificial sequence; identical to SEQ ID NO: 248
  artificial DNA molecule for generation of DNA nanostructure

SEQ ID NO: 446 - DNA, 44 bp, Artificial sequence; identical to SEQ ID NO: 249
  artificial DNA molecule for generation of DNA nanostructure

SEQ ID NO: 447 - DNA, 47 bp, Artificial sequence; identical to SEQ ID NO: 250
  artificial DNA molecule for generation of DNA nanostructure

SEQ ID NO: 448 - DNA, 40 bp, Artificial sequence; identical to SEQ ID NO: 251
  artificial DNA molecule for generation of DNA nanostructure

SEQ ID NO: 449 - DNA, 42 bp, Artificial sequence; identical to SEQ ID NO: 252
  artificial DNA molecule for generation of DNA nanostructure

SEQ ID NO: 450 - DNA, 40 bp, Artificial sequence; identical to SEQ ID NO: 253
  artificial DNA molecule for generation of DNA nanostructure

SEQ ID NO: 451 - DNA, 40 bp, Artificial sequence; identical to SEQ ID NO: 254
  artificial DNA molecule for generation of DNA nanostructure

SEQ ID NO: 452 - DNA, 47 bp, Artificial sequence; identical to SEQ ID NO: 255
  artificial DNA molecule for generation of DNA nanostructure

SEQ ID NO: 453 - DNA, 44 bp, Artificial sequence
  artificial DNA molecule for generation of DNA nanostructure
cttaaaaagagacgcagaaacgaaaggattaggattatgccgtc

SEQ ID NO: 454 - DNA, 42 bp, Artificial sequence
  artificial DNA molecule for generation of DNA nanostructure
gtacatcgacataaaaaagcggggtccaggaacgacgtgctt

SEQ ID NO: 455 - DNA, 48 bp, Artificial sequence; identical to SEQ ID NO: 258
  artificial DNA molecule for generation of DNA nanostructure

SEQ ID NO: 456 - DNA, 47 bp, Artificial sequence; identical to SEQ ID NO: 259
  artificial DNA molecule for generation of DNA nanostructure

SEQ ID NO: 457 - DNA, 48 bp, Artificial sequence; identical to SEQ ID NO: 260
  artificial DNA molecule for generation of DNA nanostructure

SEQ ID NO: 458 - DNA, 34 bp, Artificial sequence; identical to SEQ ID NO: 261
  artificial DNA molecule for generation of DNA nanostructure

SEQ ID NO: 459 - DNA, 47 bp, Artificial sequence; identical to SEQ ID NO: 262
  artificial DNA molecule for generation of DNA nanostructure

SEQ ID NO: 460 - DNA, 52 bp, Artificial sequence; identical to SEQ ID NO: 263
  artificial DNA molecule for generation of DNA nanostructure

SEQ ID NO: 461 - DNA, 44 bp, Artificial sequence; identical to SEQ ID NO: 264
  artificial DNA molecule for generation of DNA nanostructure

SEQ ID NO: 462 - DNA, 19 bp, Artificial sequence
  artificial DNA molecule for generation of DNA nanostructure
aaccaccaccaggccacca

SEQ ID NO: 463 - DNA, 39 bp, Artificial sequence; identical to SEQ ID NO: 266
  artificial DNA molecule for generation of DNA nanostructure

SEQ ID NO: 464 - DNA, 47 bp, Artificial sequence; identical to SEQ ID NO: 267
  artificial DNA molecule for generation of DNA nanostructure

SEQ ID NO: 465 - DNA, 32 bp, Artificial sequence; identical to SEQ ID NO: 268
  artificial DNA molecule for generation of DNA nanostructure

SEQ ID NO: 466 - DNA, 48 bp, Artificial sequence; identical to SEQ ID NO: 269
  artificial DNA molecule for generation of DNA nanostructure

SEQ ID NO: 467 - DNA, 45 bp, Artificial sequence
  artificial DNA molecule for generation of DNA nanostructure
tcagtatttaacatcaccatcacgttaaaggggattcgccgttgt

SEQ ID NO: 468 - DNA, 47 bp, Artificial sequence; identical to SEQ ID NO: 271
  artificial DNA molecule for generation of DNA nanostructure

SEQ ID NO: 469 - DNA, 39 bp, Artificial sequence; identical to SEQ ID NO: 272
  artificial DNA molecule for generation of DNA nanostructure

SEQ ID NO: 470 - DNA, 48 bp, Artificial sequence; identical to SEQ ID NO: 273
  artificial DNA molecule for generation of DNA nanostructure

SEQ ID NO: 471 - DNA, 40 bp, Artificial sequence; identical to SEQ ID NO: 274
  artificial DNA molecule for generation of DNA nanostructure

SEQ ID NO: 472 - DNA, 32 bp, Artificial sequence; identical to SEQ ID NO: 275
  artificial DNA molecule for generation of DNA nanostructure

SEQ ID NO: 473 - DNA, 47 bp, Artificial sequence; identical to SEQ ID NO: 276
  artificial DNA molecule for generation of DNA nanostructure

SEQ ID NO: 474 - DNA, 39 bp, Artificial sequence; identical to SEQ ID NO: 277
  artificial DNA molecule for generation of DNA nanostructure

SEQ ID NO: 475 - DNA, 48 bp, Artificial sequence; identical to SEQ ID NO: 278
  artificial DNA molecule for generation of DNA nanostructure

SEQ ID NO: 476 - DNA, 39 bp, Artificial sequence; identical to SEQ ID NO: 279
  artificial DNA molecule for generation of DNA nanostructure

SEQ ID NO: 477 - DNA, 31 bp, Artificial sequence; identical to SEQ ID NO: 280
  artificial DNA molecule for generation of DNA nanostructure

SEQ ID NO: 478 - DNA, 28 bp, Artificial sequence
  artificial DNA molecule for generation of DNA nanostructure
aacaccgcctgcaatcagccgccaccag

SEQ ID NO: 479 - DNA, 47 bp, Artificial sequence; identical to SEQ ID NO: 282
  artificial DNA molecule for generation of DNA nanostructure

SEQ ID NO: 480 - DNA, 42 bp, Artificial sequence; identical to SEQ ID NO: 283
  artificial DNA molecule for generation of DNA nanostructure

SEQ ID NO: 481 - DNA, 48 bp, Artificial sequence; identical to SEQ ID NO: 284
  artificial DNA molecule for generation of DNA nanostructure

SEQ ID NO: 482 - DNA, 38 bp, Artificial sequence; identical to SEQ ID NO: 285
  artificial DNA molecule for generation of DNA nanostructure

SEQ ID NO: 483 - DNA, 47 bp, Artificial sequence; identical to SEQ ID NO: 286
  artificial DNA molecule for generation of DNA nanostructure

SEQ ID NO: 484 - DNA, 44 bp, Artificial sequence; identical to SEQ ID NO: 287
  artificial DNA molecule for generation of DNA nanostructure

SEQ ID NO: 485 - DNA, 35 bp, Artificial sequence; identical to SEQ ID NO: 288
  artificial DNA molecule for generation of DNA nanostructure

SEQ ID NO: 486 - DNA, 52 bp, Artificial sequence; identical to SEQ ID NO: 289
  artificial DNA molecule for generation of DNA nanostructure

SEQ ID NO: 487 - DNA, 46 bp, Artificial sequence; identical to SEQ ID NO: 290
  artificial DNA molecule for generation of DNA nanostructure

SEQ ID NO: 488 - DNA, 43 bp, Artificial sequence; identical to SEQ ID NO: 291
  artificial DNA molecule for generation of DNA nanostructure

SEQ ID NO: 489 - DNA, 44 bp, Artificial sequence; identical to SEQ ID NO: 292
  artificial DNA molecule for generation of DNA nanostructure

SEQ ID NO: 490 - DNA, 46 bp, Artificial sequence; identical to SEQ ID NO: 293
  artificial DNA molecule for generation of DNA nanostructure

SEQ ID NO: 491 - DNA, 50 bp, Artificial sequence; identical to SEQ ID NO: 294
  artificial DNA molecule for generation of DNA nanostructure

SEQ ID NO: 492 - DNA, 46 bp, Artificial sequence; identical to SEQ ID NO: 295
  artificial DNA molecule for generation of DNA nanostructure

SEQ ID NO: 493 - DNA, 52 bp, Artificial sequence; identical to SEQ ID NO: 296
  artificial DNA molecule for generation of DNA nanostructure

SEQ ID NO: 494 - DNA, 38 bp, Artificial sequence; identical to SEQ ID NO: 297
  artificial DNA molecule for generation of DNA nanostructure

SEQ ID NO: 495 - DNA, 46 bp, Artificial sequence; identical to SEQ ID NO: 298
  artificial DNA molecule for generation of DNA nanostructure

SEQ ID NO: 496 - DNA, 46 bp, Artificial sequence; identical to SEQ ID NO: 299
  artificial DNA molecule for generation of DNA nanostructure

SEQ ID NO: 497 - DNA, 38 bp, Artificial sequence; identical to SEQ ID NO: 300
  artificial DNA molecule for generation of DNA nanostructure

SEQ ID NO: 498 - DNA, 39 bp, Artificial sequence; identical to SEQ ID NO: 301
  artificial DNA molecule for generation of DNA nanostructure

SEQ ID NO: 499 - DNA, 47 bp, Artificial sequence; identical to SEQ ID NO: 302
  artificial DNA molecule for generation of DNA nanostructure

SEQ ID NO: 500 - DNA, 34 bp, Artificial sequence; identical to SEQ ID NO: 303
  artificial DNA molecule for generation of DNA nanostructure

SEQ ID NO: 501 - DNA, 39 bp, Artificial sequence; identical to SEQ ID NO: 304
  artificial DNA molecule for generation of DNA nanostructure

SEQ ID NO: 502 - DNA, 32 bp, Artificial sequence; identical to SEQ ID NO: 305
  artificial DNA molecule for generation of DNA nanostructure

SEQ ID NO: 503 - DNA, 48 bp, Artificial sequence; identical to SEQ ID NO: 306
  artificial DNA molecule for generation of DNA nanostructure

SEQ ID NO: 504 - DNA, 47 bp, Artificial sequence; identical to SEQ ID NO: 307
  artificial DNA molecule for generation of DNA nanostructure

SEQ ID NO: 505 - DNA, 40 bp, Artificial sequence; identical to SEQ ID NO: 308
  artificial DNA molecule for generation of DNA nanostructure

SEQ ID NO: 506 - DNA, 37 bp, Artificial sequence; identical to SEQ ID NO: 309
  artificial DNA molecule for generation of DNA nanostructure

SEQ ID NO: 507 - DNA, 39 bp, Artificial sequence; identical to SEQ ID NO: 310
  artificial DNA molecule for generation of DNA nanostructure

SEQ ID NO: 508 - DNA, 42 bp, Artificial sequence; identical to SEQ ID NO: 311
  artificial DNA molecule for generation of DNA nanostructure

SEQ ID NO: 509 - DNA, 40 bp, Artificial sequence; identical to SEQ ID NO: 312
  artificial DNA molecule for generation of DNA nanostructure

SEQ ID NO: 510 - DNA, 31 bp, Artificial sequence; identical to SEQ ID NO: 313
  artificial DNA molecule for generation of DNA nanostructure

SEQ ID NO: 511 - DNA, 32 bp, Artificial sequence; identical to SEQ ID NO: 314
  artificial DNA molecule for generation of DNA nanostructure

SEQ ID NO: 512 - DNA, 40 bp, Artificial sequence; identical to SEQ ID NO: 315
  artificial DNA molecule for generation of DNA nanostructure

SEQ ID NO: 513 - DNA, 44 bp, Artificial sequence
  artificial DNA molecule for generation of DNA nanostructure
ttggtggattgaccgtaatggatattatttgcacgtaaggttta

SEQ ID NO: 514 - DNA, 42 bp, Artificial sequence; identical to SEQ ID NO: 317
  artificial DNA molecule for generation of DNA nanostructure

SEQ ID NO: 515 - DNA, 42 bp, Artificial sequence
  artificial DNA molecule for generation of DNA nanostructure
gaggggacgacgacagtaagttagcggcggaatctgcaaaag

SEQ ID NO: 516 - DNA, 48 bp, Artificial sequence; identical to SEQ ID NO: 319
  artificial DNA molecule for generation of DNA nanostructure

SEQ ID NO: 517 - DNA, 47 bp, Artificial sequence; identical to SEQ ID NO: 320
  artificial DNA molecule for generation of DNA nanostructure

SEQ ID NO: 518 - DNA, 45 bp, Artificial sequence
  artificial DNA molecule for generation of DNA nanostructure
ctgaaaagaaagcggaataaatcagatagcgtgagtaacaagttt

SEQ ID NO: 519 - DNA, 32 bp, Artificial sequence; identical to SEQ ID NO: 322
  artificial DNA molecule for generation of DNA nanostructure

SEQ ID NO: 520 - DNA, 39 bp, Artificial sequence; identical to SEQ ID NO: 323
  artificial DNA molecule for generation of DNA nanostructure

SEQ ID NO: 521 - DNA, 40 bp, Artificial sequence; identical to SEQ ID NO: 324
  artificial DNA molecule for generation of DNA nanostructure

SEQ ID NO: 522 - DNA, 34 bp, Artificial sequence; identical to SEQ ID NO: 325
  artificial DNA molecule for generation of DNA nanostructure

SEQ ID NO: 523 - DNA, 48 bp, Artificial sequence; identical to SEQ ID NO: 326
  artificial DNA molecule for generation of DNA nanostructure

SEQ ID NO: 524 - DNA, 40 bp, Artificial sequence; identical to SEQ ID NO: 327
  artificial DNA molecule for generation of DNA nanostructure

SEQ ID NO: 525 - DNA, 40 bp, Artificial sequence; identical to SEQ ID NO: 328
  artificial DNA molecule for generation of DNA nanostructure

SEQ ID NO: 526 - DNA, 47 bp, Artificial sequence; identical to SEQ ID NO: 329
  artificial DNA molecule for generation of DNA nanostructure

SEQ ID NO: 527 - DNA, 39 bp, Artificial sequence; identical to SEQ ID NO: 330
  artificial DNA molecule for generation of DNA nanostructure

SEQ ID NO: 528 - DNA, 47 bp, Artificial sequence; identical to SEQ ID NO: 331
  artificial DNA molecule for generation of DNA nanostructure

SEQ ID NO: 529 - DNA, 48 bp, Artificial sequence; identical to SEQ ID NO: 332
  artificial DNA molecule for generation of DNA nanostructure

SEQ ID NO: 530 - DNA, 48 bp, Artificial sequence; identical to SEQ ID NO: 333
  artificial DNA molecule for generation of DNA nanostructure

SEQ ID NO: 531 - DNA, 39 bp, Artificial sequence; identical to SEQ ID NO: 334
  artificial DNA molecule for generation of DNA nanostructure

SEQ ID NO: 532 - DNA, 39 bp, Artificial sequence; identical to SEQ ID NO: 335
  artificial DNA molecule for generation of DNA nanostructure

SEQ ID NO: 533 - DNA, 48 bp, Artificial sequence; identical to SEQ ID NO: 336
  artificial DNA molecule for generation of DNA nanostructure

SEQ ID NO: 534 - DNA, 47 bp, Artificial sequence; identical to SEQ ID NO: 337
  artificial DNA molecule for generation of DNA nanostructure

SEQ ID NO: 535 - DNA, 46 bp, Artificial sequence; identical to SEQ ID NO: 338
  artificial DNA molecule for generation of DNA nanostructure

SEQ ID NO: 536 - DNA, 50 bp, Artificial sequence; identical to SEQ ID NO: 339
  artificial DNA molecule for generation of DNA nanostructure

SEQ ID NO: 537 - DNA, 35 bp, Artificial sequence; identical to SEQ ID NO: 340
  artificial DNA molecule for generation of DNA nanostructure

SEQ ID NO: 538 - DNA, 46 bp, Artificial sequence; identical to SEQ ID NO: 341
  artificial DNA molecule for generation of DNA nanostructure

SEQ ID NO: 539 - DNA, 46 bp, Artificial sequence; identical to SEQ ID NO: 342
  artificial DNA molecule for generation of DNA nanostructure

SEQ ID NO: 540 - DNA, 46 bp, Artificial sequence; identical to SEQ ID NO: 343
  artificial DNA molecule for generation of DNA nanostructure

SEQ ID NO: 541 - DNA, 44 bp, Artificial sequence; identical to SEQ ID NO: 344
  artificial DNA molecule for generation of DNA nanostructure

SEQ ID NO: 542 - DNA, 46 bp, Artificial sequence; identical to SEQ ID NO: 345
  artificial DNA molecule for generation of DNA nanostructure

SEQ ID NO: 543 - DNA, 44 bp, Artificial sequence; identical to SEQ ID NO: 346
  artificial DNA molecule for generation of DNA nanostructure

SEQ ID NO: 544 - DNA, 38 bp, Artificial sequence; identical to SEQ ID NO: 347
  artificial DNA molecule for generation of DNA nanostructure

SEQ ID NO: 545 - DNA, 52 bp, Artificial sequence; identical to SEQ ID NO: 348
  artificial DNA molecule for generation of DNA nanostructure

SEQ ID NO: 546 - DNA, 38 bp, Artificial sequence; identical to SEQ ID NO: 349
  artificial DNA molecule for generation of DNA nanostructure

SEQ ID NO: 547 - DNA, 43 bp, Artificial sequence; identical to SEQ ID NO: 350
  artificial DNA molecule for generation of DNA nanostructure

SEQ ID NO: 548 - DNA, 52 bp, Artificial sequence; identical to SEQ ID NO: 351
  artificial DNA molecule for generation of DNA nanostructure

SEQ ID NO: 549 - DNA, 22 bp, Artificial sequence
  artificial DNA molecule for generation of DNA nanostructure
acaaagtacaattcctgagttt

SEQ ID NO: 550 - DNA, 51 bp, Artificial sequence; identical to SEQ ID NO: 353
  artificial DNA molecule for generation of DNA nanostructure

SEQ ID NO: 551 - DNA, 34 bp, Artificial sequence; identical to SEQ ID NO: 354
  artificial DNA molecule for generation of DNA nanostructure

SEQ ID NO: 552 - DNA, 46 bp, Artificial sequence
  artificial DNA molecule for generation of DNA nanostructure
cgtcaccagtactttccggcaccgcttctggtgcctgctgcaaggc

SEQ ID NO: 553 - DNA, 50 bp, Artificial sequence; identical to SEQ ID NO: 356
  artificial DNA molecule for generation of DNA nanostructure

SEQ ID NO: 554 - DNA, 35 bp, Artificial sequence; identical to SEQ ID NO: 357
  artificial DNA molecule for generation of DNA nanostructure

SEQ ID NO: 555 - DNA, 32 bp, Artificial sequence; identical to SEQ ID NO: 358
  artificial DNA molecule for generation of DNA nanostructure

SEQ ID NO: 556 - DNA, 45 bp, Artificial sequence; identical to SEQ ID NO: 359
  artificial DNA molecule for generation of DNA nanostructure

SEQ ID NO: 557 - DNA, 43 bp, Artificial sequence; identical to SEQ ID NO: 360
  artificial DNA molecule for generation of DNA nanostructure

SEQ ID NO: 558 - DNA, 44 bp, Artificial sequence; identical to SEQ ID NO: 361
  artificial DNA molecule for generation of DNA nanostructure

SEQ ID NO: 559 - DNA, 44 bp, Artificial sequence; identical to SEQ ID NO: 362
  artificial DNA molecule for generation of DNA nanostructure

SEQ ID NO: 560 - DNA, 45 bp, Artificial sequence; identical to SEQ ID NO: 363
  artificial DNA molecule for generation of DNA nanostructure

SEQ ID NO: 561 - DNA, 29 bp, Artificial sequence
  artificial DNA molecule for generation of DNA nanostructure
atagcttagattagaagagtccagtcacg

SEQ ID NO: 562 - DNA, 44 bp, Artificial sequence; identical to SEQ ID NO: 365
  artificial DNA molecule for generation of DNA nanostructure

SEQ ID NO: 563 - DNA, 42 bp, Artificial sequence; identical to SEQ ID NO: 366
  artificial DNA molecule for generation of DNA nanostructure

SEQ ID NO: 564 - DNA, 51 bp, Artificial sequence; identical to SEQ ID NO: 367
  artificial DNA molecule for generation of DNA nanostructure

SEQ ID NO: 565 - DNA, 50 bp, Artificial sequence; identical to SEQ ID NO: 368
  artificial DNA molecule for generation of DNA nanostructure

SEQ ID NO: 566 - DNA, 46 bp, Artificial sequence
  artificial DNA molecule for generation of DNA nanostructure
tacatttaacaaacggataacctcaccggaaacaaagcggatcaaa

SEQ ID NO: 567 - DNA, 32 bp, Artificial sequence; identical to SEQ ID NO: 370
  artificial DNA molecule for generation of DNA nanostructure

SEQ ID NO: 568 - DNA, 35 bp, Artificial sequence; identical to SEQ ID NO: 371
  artificial DNA molecule for generation of DNA nanostructure

SEQ ID NO: 569 - DNA, 22 bp, Artificial sequence
  artificial DNA molecule for generation of DNA nanostructure
aataaacaacatcgaaattaat

SEQ ID NO: 570 - DNA, 44 bp, Artificial sequence; identical to SEQ ID NO: 373
  artificial DNA molecule for generation of DNA nanostructure

SEQ ID NO: 571 - DNA, 45 bp, Artificial sequence; identical to SEQ ID NO: 374
  artificial DNA molecule for generation of DNA nanostructure

SEQ ID NO: 572 - DNA, 45 bp, Artificial sequence; identical to SEQ ID NO: 375
  artificial DNA molecule for generation of DNA nanostructure

SEQ ID NO: 573 - DNA, 29 bp, Artificial sequence
  artificial DNA molecule for generation of DNA nanostructure
atgggtaaaggttgtcataaagttgggcg

SEQ ID NO: 574 - DNA, 44 bp, Artificial sequence; identical to SEQ ID NO: 377
  artificial DNA molecule for generation of DNA nanostructure

SEQ ID NO: 575 - DNA, 44 bp, Artificial sequence; identical to SEQ ID NO: 378
  artificial DNA molecule for generation of DNA nanostructure

SEQ ID NO: 576 - DNA, 43 bp, Artificial sequence; identical to SEQ ID NO: 379
  artificial DNA molecule for generation of DNA nanostructure

SEQ ID NO: 577 - DNA, 32 bp, Artificial sequence; identical to SEQ ID NO: 380
  artificial DNA molecule for generation of DNA nanostructure

SEQ ID NO: 578 - DNA, 46 bp, Artificial sequence
  artificial DNA molecule for generation of DNA nanostructure
cggtggtgccattagtgatgaagggtaaagttaaagataggtcacg

SEQ ID NO: 579 - DNA, 42 bp, Artificial sequence; identical to SEQ ID NO: 382
  artificial DNA molecule for generation of DNA nanostructure

SEQ ID NO: 580 - DNA, 35 bp, Artificial sequence; identical to SEQ ID NO: 383
  artificial DNA molecule for generation of DNA nanostructure

SEQ ID NO: 581 - DNA, 50 bp, Artificial sequence; identical to SEQ ID NO: 384
  artificial DNA molecule for generation of DNA nanostructure

SEQ ID NO: 582 - DNA, 35 bp, Artificial sequence; identical to SEQ ID NO: 385
  artificial DNA molecule for generation of DNA nanostructure

SEQ ID NO: 583 - DNA, 22 bp, Artificial sequence
  artificial DNA molecule for generation of DNA nanostructure
ttaatgaatcgcagagcaccgt

SEQ ID NO: 584 - DNA, 29 bp, Artificial sequence
  artificial DNA molecule for generation of DNA nanostructure
aacagtttcagcgtagaaaggcatctgcc

SEQ ID NO: 585 - DNA, 44 bp, Artificial sequence; identical to SEQ ID NO: 388
  artificial DNA molecule for generation of DNA nanostructure

SEQ ID NO: 586 - DNA, 45 bp, Artificial sequence; identical to SEQ ID NO: 389
  artificial DNA molecule for generation of DNA nanostructure

SEQ ID NO: 587 - DNA, 44 bp, Artificial sequence; identical to SEQ ID NO: 390
  artificial DNA molecule for generation of DNA nanostructure

SEQ ID NO: 588 - DNA, 43 bp, Artificial sequence; identical to SEQ ID NO: 391
  artificial DNA molecule for generation of DNA nanostructure

SEQ ID NO: 589 - DNA, 44 bp, Artificial sequence; identical to SEQ ID NO: 392
  artificial DNA molecule for generation of DNA nanostructure

SEQ ID NO: 590 - DNA, 45 bp, Artificial sequence; identical to SEQ ID NO: 393
  artificial DNA molecule for generation of DNA nanostructure

SEQ ID NO: 591 - DNA, 50 bp, Artificial sequence
  artificial DNA molecule for generation of DNA nanostructure
cgaacgtggcgtttttgaaaggaacgctgcgcgtttttaaccacctaaag

SEQ ID NO: 592 - DNA, 44 bp, Artificial sequence
  artificial DNA molecule for generation of DNA nanostructure
tcacgttggtgtacaagctttttttcagaggtggtggccagggt

SEQ ID NO: 593 - DNA, 46 bp, Artificial sequence
  artificial DNA molecule for generation of DNA nanostructure
ccaataacgcgttttgattgcatatccccctctgtagccttaaaag

SEQ ID NO: 594 - DNA, 39 bp, Artificial sequence
  artificial DNA molecule for generation of DNA nanostructure
aatattaccgccgcgcagcagcattgggaagtggctcat

SEQ ID NO: 595 - DNA, 30 bp, Artificial sequence
  artificial DNA molecule for generation of DNA nanostructure
gcgcttagaaataccagatagggccgtcgg

SEQ ID NO: 596 - DNA, 50 bp, Artificial sequence
  artificial DNA molecule for generation of DNA nanostructure
tgaggaaggttatctaatttttatatctttaggagcactatgcaaatcaa

SEQ ID NO: 597 - DNA, 31 bp, Artificial sequence
  artificial DNA molecule for generation of DNA nanostructure
gcaagtgtaaatggattattccctccgtggg

SEQ ID NO: 598 - DNA, 38 bp, Artificial sequence
  artificial DNA molecule for generation of DNA nanostructure
agggaagaaagcgaaatagaaccaagggacattctggc

SEQ ID NO: 599 - DNA, 34 bp, Artificial sequence
  artificial DNA molecule for generation of DNA nanostructure
acaagagtcctttttctattaaagaaagtgtcac

SEQ ID NO: 600 - DNA, 50 bp, Artificial sequence
  artificial DNA molecule for generation of DNA nanostructure
agctttcatcaacatgccatcaattaagagggcgggcaaagaattagcaa

SEQ ID NO: 601 - DNA, 42 bp, Artificial sequence
  artificial DNA molecule for generation of DNA nanostructure
cgtggactaaatcccttataaattttttaaaagaatagcccg

SEQ ID NO: 602 - DNA, 49 bp, Artificial sequence
  artificial DNA molecule for generation of DNA nanostructure
cagttttggggcgcgagattgctgatgctccttcttttgcaaatactgc

SEQ ID NO: 603 - DNA, 40 bp, Artificial sequence
  artificial DNA molecule for generation of DNA nanostructure
ttgtaatatccagaacaagtgtttgctacagggcgcgttt

SEQ ID NO: 604 - DNA, 48 bp, Artificial sequence
  artificial DNA molecule for generation of DNA nanostructure
tttagaagtaacaactaatagattaccgtaatgacgctcacgctcatg

SEQ ID NO: 605 - DNA, 48 bp, Artificial sequence
  artificial DNA molecule for generation of DNA nanostructure
ctgaaaaggtggcggtacgccagaacatcacttgcctataacctgttt

SEQ ID NO: 606 - DNA, 50 bp, Artificial sequence
  artificial DNA molecule for generation of DNA nanostructure
gacaactcataatacatttgaggaccccgaccagtaataacttctgacct

SEQ ID NO: 607 - DNA, 48 bp, Artificial sequence
  artificial DNA molecule for generation of DNA nanostructure
ctcaatcaattgcatctgccagtttttttgaggggacgactttcccag

SEQ ID NO: 608 - DNA, 36 bp, Artificial sequence
  artificial DNA molecule for generation of DNA nanostructure
agagccgtttcaccagtcacagctttccagtcggga

SEQ ID NO: 609 - DNA, 44 bp, Artificial sequence
  artificial DNA molecule for generation of DNA nanostructure
aggcaactataacgtgcaggaggccgattaaagggatactatgg

SEQ ID NO: 610 - DNA, 47 bp, Artificial sequence
  artificial DNA molecule for generation of DNA nanostructure
tttaaccaataggaaccaacagagaggagcggaagtacattggcaga

SEQ ID NO: 611 - DNA, 47 bp, Artificial sequence
  artificial DNA molecule for generation of DNA nanostructure
caagtaacaacccgtcggaaatattcattgacaaaaagaaaataatt

SEQ ID NO: 612 - DNA, 44 bp, Artificial sequence
  artificial DNA molecule for generation of DNA nanostructure
aacggccacacggtcatactttttgggggtttctgctgcgcgcc

SEQ ID NO: 613 - DNA, 33 bp, Artificial sequence
  artificial DNA molecule for generation of DNA nanostructure
tggtgccgggccgttttgagcacatcctcataa

SEQ ID NO: 614 - DNA, 41 bp, Artificial sequence
  artificial DNA molecule for generation of DNA nanostructure
tagtaaatgaattttcattttgcggaacaaagaaaccacca

SEQ ID NO: 615 - DNA, 47 bp, Artificial sequence
  artificial DNA molecule for generation of DNA nanostructure
accgcaagaatgccaatgtagaacaggaaaaaatcgtctgagcggtc

SEQ ID NO: 616 - DNA, 31 bp, Artificial sequence
  artificial DNA molecule for generation of DNA nanostructure
aacactatagggggtaatatatattcggtcg

SEQ ID NO: 617 - DNA, 46 bp, Artificial sequence
  artificial DNA molecule for generation of DNA nanostructure
tcacgacgttttttgtaaaacgacggccagcggataacctcaccgg

SEQ ID NO: 618 - DNA, 48 bp, Artificial sequence
  artificial DNA molecule for generation of DNA nanostructure
gtaagagcccaagcgccctcagcagcgaaagaatttcttaaaatgttt

SEQ ID NO: 619 - DNA, 43 bp, Artificial sequence
  artificial DNA molecule for generation of DNA nanostructure
tatagtcagaagcaaagcgaattcgagtagcgtccaaagaagt

SEQ ID NO: 620 - DNA, 48 bp, Artificial sequence
  artificial DNA molecule for generation of DNA nanostructure
cttcaaagagagagtacctttaatatataatgtcgtttacactaacgg

SEQ ID NO: 621 - DNA, 30 bp, Artificial sequence
  artificial DNA molecule for generation of DNA nanostructure
agagcgggatagtagtagcattatttcaac

SEQ ID NO: 622 - DNA, 48 bp, Artificial sequence
  artificial DNA molecule for generation of DNA nanostructure
cgggcaactacattttgggataggcggaacgtgccggactcggcagca

SEQ ID NO: 623 - DNA, 40 bp, Artificial sequence
  artificial DNA molecule for generation of DNA nanostructure
tttgagtaacattatctgtatgggttaaacagagactgga

SEQ ID NO: 624 - DNA, 48 bp, Artificial sequence
  artificial DNA molecule for generation of DNA nanostructure
aggtcattaacatcaattctactaagctaaactttcctcgttagaatc

SEQ ID NO: 625 - DNA, 39 bp, Artificial sequence
  artificial DNA molecule for generation of DNA nanostructure
tttagccattgcaacgtcagcgtaacaaacggcggattg

SEQ ID NO: 626 - DNA, 42 bp, Artificial sequence
  artificial DNA molecule for generation of DNA nanostructure
ctgtggccgggcgcggttgcggtattttttagccgggtcact

SEQ ID NO: 627 - DNA, 33 bp, Artificial sequence
  artificial DNA molecule for generation of DNA nanostructure
agctgattgctttttcttcaccgcctcagtgag

SEQ ID NO: 628 - DNA, 47 bp, Artificial sequence
  artificial DNA molecule for generation of DNA nanostructure
cattgtgaattaccttatgcgattttttcatggataaaaaccaaggt

SEQ ID NO: 629 - DNA, 32 bp, Artificial sequence
  artificial DNA molecule for generation of DNA nanostructure
gttgttccagtttggacggcatcccacgcaac

SEQ ID NO: 630 - DNA, 48 bp, Artificial sequence
  artificial DNA molecule for generation of DNA nanostructure
aaagcgtaagaattagtctttaattaattgcgttgtttttgctcactg

SEQ ID NO: 631 - DNA, 46 bp, Artificial sequence
  artificial DNA molecule for generation of DNA nanostructure
ggtgctggtctaatagcgagaggttgataagtcaaatatatcatac

SEQ ID NO: 632 - DNA, 39 bp, Artificial sequence
  artificial DNA molecule for generation of DNA nanostructure
atcgtcacgaaacaaagtacaacgagtaaattgttgaga

SEQ ID NO: 633 - DNA, 47 bp, Artificial sequence
  artificial DNA molecule for generation of DNA nanostructure
tcggccttgctggagtcaatacttctttgattagtaataatcctgag

SEQ ID NO: 634 - DNA, 48 bp, Artificial sequence
  artificial DNA molecule for generation of DNA nanostructure
aatcggcaccaacgtctgtccatcacgcaatttttttaaccgttgtag

SEQ ID NO: 635 - DNA, 42 bp, Artificial sequence
  artificial DNA molecule for generation of DNA nanostructure
gattgccgttttttccggcaaaacattttttcggcgaaacgt

SEQ ID NO: 636 - DNA, 39 bp, Artificial sequence
  artificial DNA molecule for generation of DNA nanostructure
gatggctttcagagtagaagaactcaaactatcaggacg

SEQ ID NO: 637 - DNA, 35 bp, Artificial sequence
  artificial DNA molecule for generation of DNA nanostructure
ttgctttgacgagcacgtagggcgctgtagacagg

SEQ ID NO: 638 - DNA, 37 bp, Artificial sequence
  artificial DNA molecule for generation of DNA nanostructure
atgcgccttataatcagtgaggctttttaccgagtaa

SEQ ID NO: 639 - DNA, 37 bp, Artificial sequence
  artificial DNA molecule for generation of DNA nanostructure
cagatgatggcaattcagaaaacgagttccaaatgct

SEQ ID NO: 640 - DNA, 48 bp, Artificial sequence
  artificial DNA molecule for generation of DNA nanostructure
agctatattttcacaaccattagatacatttctaaaacgacagacgac

SEQ ID NO: 641 - DNA, 40 bp, Artificial sequence
  artificial DNA molecule for generation of DNA nanostructure
aacgcggtccgttttttcaatccgtgctgcggccagaatg

SEQ ID NO: 642 - DNA, 40 bp, Artificial sequence
  artificial DNA molecule for generation of DNA nanostructure
tataccaggtgtccagcatcagcgcagcttacggctggag

SEQ ID NO: 643 - DNA, 32 bp, Artificial sequence
  artificial DNA molecule for generation of DNA nanostructure
gggcttgagatggtttaatttcaacgattata

SEQ ID NO: 644 - DNA, 50 bp, Artificial sequence
  artificial DNA molecule for generation of DNA nanostructure
ttttcagggatagcacaccctcaaaaggtggtacccaccaccggaaccgc

SEQ ID NO: 645 - DNA, 40 bp, Artificial sequence
  artificial DNA molecule for generation of DNA nanostructure
cctaattttattcattacccaaatcttgacaagaaccgga

SEQ ID NO: 646 - DNA, 47 bp, Artificial sequence
  artificial DNA molecule for generation of DNA nanostructure
atcctgaatcttaccaacgctaacaacgccaaagagagataaccagg

SEQ ID NO: 647 - DNA, 32 bp, Artificial sequence
  artificial DNA molecule for generation of DNA nanostructure
tagttgctattttgcacccagctagctaatgc

SEQ ID NO: 648 - DNA, 47 bp, Artificial sequence
  artificial DNA molecule for generation of DNA nanostructure
tatcaggtcattggttctagctgataaattaatgccggaaatgtgta

SEQ ID NO: 649 - DNA, 42 bp, Artificial sequence
  artificial DNA molecule for generation of DNA nanostructure
gagatttgtttttatcatcgaaaggtttttcgcttttgcggg

SEQ ID NO: 650 - DNA, 40 bp, Artificial sequence
  artificial DNA molecule for generation of DNA nanostructure
cctgataaattgtgtcgtgaataaataccacattcaacta

SEQ ID NO: 651 - DNA, 38 bp, Artificial sequence
  artificial DNA molecule for generation of DNA nanostructure
agagcataaagctaacgcattaaaacgttaatattttg

SEQ ID NO: 652 - DNA, 39 bp, Artificial sequence
  artificial DNA molecule for generation of DNA nanostructure
tatgcgttcctgtttatcaacaatatcaagataatagca

SEQ ID NO: 653 - DNA, 50 bp, Artificial sequence
  artificial DNA molecule for generation of DNA nanostructure
aattaagcaattttttaagcctctttgcgggagtttttagcctttaacat

SEQ ID NO: 654 - DNA, 44 bp, Artificial sequence
  artificial DNA molecule for generation of DNA nanostructure
cacagacagccctgcccactttttcataaccgagtaaacagctt

SEQ ID NO: 655 - DNA, 46 bp, Artificial sequence
  artificial DNA molecule for generation of DNA nanostructure
tagttgcgctttttgacaatgacaacaaccttacttgcagggagtt

SEQ ID NO: 656 - DNA, 44 bp, Artificial sequence
  artificial DNA molecule for generation of DNA nanostructure
tgaggcttcgccaaaaggatttttttacgaggcataattcatca

SEQ ID NO: 657 - DNA, 41 bp, Artificial sequence
  artificial DNA molecule for generation of DNA nanostructure
catagcgatagcttagtaacggattcgcctgattgctttga

SEQ ID NO: 658 - DNA, 48 bp, Artificial sequence
  artificial DNA molecule for generation of DNA nanostructure
aaggagcggataaagttttgtcttttttctttccagacgtgataccga

SEQ ID NO: 659 - DNA, 48 bp, Artificial sequence
  artificial DNA molecule for generation of DNA nanostructure
ctgtagcttagtttgaatcaccatcaatattttttatattcaaccgtt

SEQ ID NO: 660 - DNA, 48 bp, Artificial sequence
  artificial DNA molecule for generation of DNA nanostructure
ctttagcgtcagaccaagcagcaccgtaatcaatcccaatctaatatc

SEQ ID NO: 661 - DNA, 50 bp, Artificial sequence
  artificial DNA molecule for generation of DNA nanostructure
gattttcaatatcaaaattatttgaggtatttaaattgtaatttttgtta

SEQ ID NO: 662 - DNA, 40 bp, Artificial sequence
  artificial DNA molecule for generation of DNA nanostructure
gaacctgagagtctggggtaaagatttagaaccctcatat

SEQ ID NO: 663 - DNA, 39 bp, Artificial sequence
  artificial DNA molecule for generation of DNA nanostructure
agcaaacaagagtaaacagatgacaaaataattccagag

SEQ ID NO: 664 - DNA, 49 bp, Artificial sequence
  artificial DNA molecule for generation of DNA nanostructure
cgttctgtagcgcgtttttcattaaacattcaagttaagccttttaaga

SEQ ID NO: 665 - DNA, 48 bp, Artificial sequence
  artificial DNA molecule for generation of DNA nanostructure
tcatcggcattttaatgcctgagtgagggtagctattatcaagtttgc

SEQ ID NO: 666 - DNA, 40 bp, Artificial sequence
  artificial DNA molecule for generation of DNA nanostructure
acatcgggagaaacaaattaagaccgaggaaaatcttacc

SEQ ID NO: 667 - DNA, 46 bp, Artificial sequence
  artificial DNA molecule for generation of DNA nanostructure
caaaatcgacaccactagaaaatgttaccagcaccctcaacctttt

SEQ ID NO: 668 - DNA, 39 bp, Artificial sequence
  artificial DNA molecule for generation of DNA nanostructure
atattgacagatttgagagatctacaaaggcgccagtta

SEQ ID NO: 669 - DNA, 42 bp, Artificial sequence
  artificial DNA molecule for generation of DNA nanostructure
agtagattcaacatgttttaaatttttttgcaactaaagtac

SEQ ID NO: 670 - DNA, 37 bp, Artificial sequence
  artificial DNA molecule for generation of DNA nanostructure
aaaaattttcaaaagggtgagaatttttggccggaga

SEQ ID NO: 671 - DNA, 30 bp, Artificial sequence
  artificial DNA molecule for generation of DNA nanostructure
caaggatcatgtcaaggtgtctggctggct

SEQ ID NO: 672 - DNA, 48 bp, Artificial sequence
  artificial DNA molecule for generation of DNA nanostructure
cacgtaaattctgaataatggaagaacgcctgaccccggtaaaactag

SEQ ID NO: 673 - DNA, 47 bp, Artificial sequence
  artificial DNA molecule for generation of DNA nanostructure
ccaccctcagaaccgcttaaaattatcggttgcaaaaaacaggaaga

SEQ ID NO: 674 - DNA, 42 bp, Artificial sequence
  artificial DNA molecule for generation of DNA nanostructure
ttaggaggcttgccctgacgagaaatttttaccagaacgagt

SEQ ID NO: 675 - DNA, 48 bp, Artificial sequence
  artificial DNA molecule for generation of DNA nanostructure
caccctgaagaacgcgatacaaattcttaccataatttcacaatagct

SEQ ID NO: 676 - DNA, 33 bp, Artificial sequence
  artificial DNA molecule for generation of DNA nanostructure
caaactccaatttttaggtcaggattcgaacca

SEQ ID NO: 677 - DNA, 39 bp, Artificial sequence
  artificial DNA molecule for generation of DNA nanostructure
aggaatcgatgaacgaactgacccaccagtacaaactac

SEQ ID NO: 678 - DNA, 48 bp, Artificial sequence
  artificial DNA molecule for generation of DNA nanostructure
tttattttcaaagacaaaagggcgaggtgaatattgagcgccaaataa

SEQ ID NO: 679 - DNA, 32 bp, Artificial sequence
  artificial DNA molecule for generation of DNA nanostructure
accggaaccagagcaaaaacattaattttaaa

SEQ ID NO: 680 - DNA, 31 bp, Artificial sequence
  artificial DNA molecule for generation of DNA nanostructure
tgaccctgagaaaagccccacatagtttcgt

SEQ ID NO: 681 - DNA, 37 bp, Artificial sequence
  artificial DNA molecule for generation of DNA nanostructure
ttcatttcaattacgcaataataacgcacaaggaaac

SEQ ID NO: 682 - DNA, 50 bp, Artificial sequence
  artificial DNA molecule for generation of DNA nanostructure
ttcatcaatataatccttttttattgtttggattatacacatcctgatta

SEQ ID NO: 683 - DNA, 36 bp, Artificial sequence
  artificial DNA molecule for generation of DNA nanostructure
ggttagaattgtataagcaaatctttaccctgacta

SEQ ID NO: 684 - DNA, 47 bp, Artificial sequence
  artificial DNA molecule for generation of DNA nanostructure
cctcccatgtaccgtaacatagccgaacaaaacatacatgaaccgcc

SEQ ID NO: 685 - DNA, 32 bp, Artificial sequence
  artificial DNA molecule for generation of DNA nanostructure
tcattccatataacagatgcatcaagagtaat

SEQ ID NO: 686 - DNA, 46 bp, Artificial sequence
  artificial DNA molecule for generation of DNA nanostructure
gggagggatgccggtcatatagcgtttgccatcttttagcattgac

SEQ ID NO: 687 - DNA, 47 bp, Artificial sequence
  artificial DNA molecule for generation of DNA nanostructure
acggtgtacagaccaggggaaccggtaatcgttgataatctaatact

SEQ ID NO: 688 - DNA, 39 bp, Artificial sequence
  artificial DNA molecule for generation of DNA nanostructure
aactttgaaagcacaagaattgaccgattgaaacgcaaa

SEQ ID NO: 689 - DNA, 48 bp, Artificial sequence
  artificial DNA molecule for generation of DNA nanostructure
atcagctcatttcgcgtctggccaatgaccataaatttttcaaaaatc

SEQ ID NO: 690 - DNA, 34 bp, Artificial sequence
  artificial DNA molecule for generation of DNA nanostructure
ttgattcccatttttttctgcgaacggtagaaag

SEQ ID NO: 691 - DNA, 33 bp, Artificial sequence
  artificial DNA molecule for generation of DNA nanostructure
gaccttcagatacataaagccggaacgaggcgc

SEQ ID NO: 692 - DNA, 31 bp, Artificial sequence
  artificial DNA molecule for generation of DNA nanostructure
acaaagtcaaacaatgaaaagaataaacacc

SEQ ID NO: 693 - DNA, 43 bp, Artificial sequence
  artificial DNA molecule for generation of DNA nanostructure
cgcagtatgttagcaaacgggaataaggaagccctcaataata

SEQ ID NO: 694 - DNA, 48 bp, Artificial sequence
  artificial DNA molecule for generation of DNA nanostructure
accggaagtcatatgttagcattcagacggtcaatcataagcgcatag

SEQ ID NO: 695 - DNA, 36 bp, Artificial sequence
  artificial DNA molecule for generation of DNA nanostructure
acatttaagcggataagtgccttaagactccttatt

SEQ ID NO: 696 - DNA, 46 bp, Artificial sequence
  artificial DNA molecule for generation of DNA nanostructure
ggagccccgccagggttaatgaataaagcctgcgaactgcaaatga

SEQ ID NO: 697 - DNA, 48 bp, Artificial sequence
  artificial DNA molecule for generation of DNA nanostructure
cttttcacggccctgagagagttgggttccgatccgtgagcccctgca

SEQ ID NO: 698 - DNA, 40 bp, Artificial sequence
  artificial DNA molecule for generation of DNA nanostructure
tcggccaaaatggctatacgtggcacagacaaggaatagg

SEQ ID NO: 699 - DNA, 48 bp, Artificial sequence
  artificial DNA molecule for generation of DNA nanostructure
cagcacgctgaagggtatgtttaccagtcccgtgggtaactgaaattg

SEQ ID NO: 700 - DNA, 43 bp, Artificial sequence
  artificial DNA molecule for generation of DNA nanostructure
acctgtcgtgccagctgcatggttttttcacaatttcgtaatc

SEQ ID NO: 701 - DNA, 39 bp, Artificial sequence
  artificial DNA molecule for generation of DNA nanostructure
tatagccccgccattatttgaattaccaagcataaagtg

SEQ ID NO: 702 - DNA, 46 bp, Artificial sequence
  artificial DNA molecule for generation of DNA nanostructure
ctggtttgacagtgccgtaaagcactaaatcggaacccacacccgc

SEQ ID NO: 703 - DNA, 39 bp, Artificial sequence
  artificial DNA molecule for generation of DNA nanostructure
ccctattattctgaagtattaaaaaacagtacataaatc

SEQ ID NO: 704 - DNA, 40 bp, Artificial sequence
  artificial DNA molecule for generation of DNA nanostructure
acaagcaagccgttttaagaacggacatgaaaattaggat

SEQ ID NO: 705 - DNA, 33 bp, Artificial sequence
  artificial DNA molecule for generation of DNA nanostructure
aattcatatgttttttttaccagcgcgtcacaa

SEQ ID NO: 706 - DNA, 32 bp, Artificial sequence
  artificial DNA molecule for generation of DNA nanostructure
ccgatttagagctcaccctcagagtgatattc

SEQ ID NO: 707 - DNA, 31 bp, Artificial sequence
  artificial DNA molecule for generation of DNA nanostructure
ccgccacctagcggggttttaggtttaatgg

SEQ ID NO: 708 - DNA, 37 bp, Artificial sequence
  artificial DNA molecule for generation of DNA nanostructure
agaaccactcagaaccgccacctgtatcacatataag

SEQ ID NO: 709 - DNA, 30 bp, Artificial sequence
  artificial DNA molecule for generation of DNA nanostructure
ggaggttaggctgagccagcaaatcgtagg

SEQ ID NO: 710 - DNA, 39 bp, Artificial sequence
  artificial DNA molecule for generation of DNA nanostructure
caggcgaaggcgtgccttgagtaacagtgccatcagatg

SEQ ID NO: 711 - DNA, 39 bp, Artificial sequence
  artificial DNA molecule for generation of DNA nanostructure
tatttcggaacccagcatcgagaccgggttagcaaatcg

SEQ ID NO: 712 - DNA, 40 bp, Artificial sequence
  artificial DNA molecule for generation of DNA nanostructure
atcaatgccccctgccaagccagagtcagacgattggcct

SEQ ID NO: 713 - DNA, 48 bp, Artificial sequence
  artificial DNA molecule for generation of DNA nanostructure
tatcaccgccatcgatgtaagcgtcatacatttttggcttttgatgat

SEQ ID NO: 714 - DNA, 37 bp, Artificial sequence
  artificial DNA molecule for generation of DNA nanostructure
gaggcagatggaaagcgcagtctttttttgaatttac

SEQ ID NO: 715 - DNA, 48 bp, Artificial sequence
  artificial DNA molecule for generation of DNA nanostructure
ttttggggtcgagaacaaataaattttaacggggtcagatggcccact

SEQ ID NO: 716 - DNA, 49 bp, Artificial sequence
  artificial DNA molecule for generation of DNA nanostructure
aagacccaaatcaagttttgatggtcagcaagcgctcgaatccacacaa

SEQ ID NO: 717 - DNA, 48 bp, Artificial sequence
  artificial DNA molecule for generation of DNA nanostructure
acgtgaaccatcagtcaaagggcgaaaaaccggccggtgccctcctca

SEQ ID NO: 718 - DNA, 48 bp, Artificial sequence
  artificial DNA molecule for generation of DNA nanostructure
caatagaaactcctcatgagtgaactttccttatcattcctattttca

SEQ ID NO: 719 - DNA, 48 bp, Artificial sequence
  artificial DNA molecule for generation of DNA nanostructure
ggtttagtaccgaccctcagagcgaatacccaaaatttttaactggca

SEQ ID NO: 720 - DNA, 39 bp, Artificial sequence
  artificial DNA molecule for generation of DNA nanostructure
ctcagagcgaggctcagtaccagcaatttcaaaaatacc

SEQ ID NO: 721 - DNA, 31 bp, Artificial sequence
  artificial DNA molecule for generation of DNA nanostructure
gtgcctgtagctgtttcctgagccgccacgg

SEQ ID NO: 722 - DNA, 47 bp, Artificial sequence
  artificial DNA molecule for generation of DNA nanostructure
cgtataaacagttaccacaggagtgtactggtaataagtcctcatta

SEQ ID NO: 723 - DNA, 32 bp, Artificial sequence
  artificial DNA molecule for generation of DNA nanostructure
agtagcaccattaccaaaataccgcgcccaat

SEQ ID NO: 724 - DNA, 34 bp, Artificial sequence
  artificial DNA molecule for generation of DNA nanostructure
ttagcaaggctttttggaaacgtcactaacgtca

SEQ ID NO: 725 - DNA, 39 bp, Artificial sequence
  artificial DNA molecule for generation of DNA nanostructure
ccaagtaccgccccgggtaccgaggtccacggtattggg

SEQ ID NO: 726 - DNA, 40 bp, Artificial sequence
  artificial DNA molecule for generation of DNA nanostructure
ttaacggcatagaaggcttatccgagcaagcaaatcagat

SEQ ID NO: 727 - DNA, 40 bp, Artificial sequence
  artificial DNA molecule for generation of DNA nanostructure
aaaatctaaagcatcaggaagatctaatgagtttatccgc

SEQ ID NO: 728 - DNA, 44 bp, Artificial sequence
  artificial DNA molecule for generation of DNA nanostructure
gaatcccacattagacgggtttttgaattaactgaaaaaatgaa

SEQ ID NO: 729 - DNA, 42 bp, Artificial sequence
  artificial DNA molecule for generation of DNA nanostructure
agataagttttttctgaacaaaagcttttttgtttagtatca

SEQ ID NO: 730 - DNA, 47 bp, Artificial sequence
  artificial DNA molecule for generation of DNA nanostructure
cgtcataaacatcccttacactggaagagacgcagttgaggatcact

SEQ ID NO: 731 - DNA, 37 bp, Artificial sequence
  artificial DNA molecule for generation of DNA nanostructure
agttgaaaggaatgagctaactcacatgcggggtgcc

SEQ ID NO: 732 - DNA, 41 bp, Artificial sequence
  artificial DNA molecule for generation of DNA nanostructure
gacagtatcggcctcaccttgctgaacctcaaatatcaaac

SEQ ID NO: 733 - DNA, 50 bp, Artificial sequence
  artificial DNA molecule for generation of DNA nanostructure
ttaacaccgaacgaaccaccagcatgagtcgagagggttgcgtactcagg

SEQ ID NO: 734 - DNA, 33 bp, Artificial sequence
  artificial DNA molecule for generation of DNA nanostructure
aatcatacagggaagcgatcaataatcggctgt

SEQ ID NO: 735 - DNA, 48 bp, Artificial sequence
  artificial DNA molecule for generation of DNA nanostructure
taccaagttataattttccctttttttgaatccttgaaaacctaaatt

SEQ ID NO: 736 - DNA, 42 bp, Artificial sequence
  artificial DNA molecule for generation of DNA nanostructure
caatgaaatcaccgacttgagccttttttttgggaattagag

SEQ ID NO: 737 - DNA, 50 bp, Artificial sequence
  artificial DNA molecule for generation of DNA nanostructure
ctccctcagagtttttcgccaccccaccagagctttttgccgcccataat

SEQ ID NO: 738 - DNA, 39 bp, Artificial sequence
  artificial DNA molecule for generation of DNA nanostructure
acagcgccaaagttaaacgatgctgttgcccttgtgcac

SEQ ID NO: 739 - DNA, 50 bp, Artificial sequence
  artificial DNA molecule for generation of DNA nanostructure
cctgagcaaaagaagattttttatgaaacaaacatcaaaacaggcgaatt

SEQ ID NO: 740 - DNA, 42 bp, Artificial sequence
  artificial DNA molecule for generation of DNA nanostructure
cctttactcccgacttgcgggaggttttttttgaagccttaa

SEQ ID NO: 741 - DNA, 48 bp, Artificial sequence
  artificial DNA molecule for generation of DNA nanostructure
gaagataagaaaacaaaattaattaatatatgagagaagggtattaag

SEQ ID NO: 742 - DNA, 44 bp, Artificial sequence
  artificial DNA molecule for generation of DNA nanostructure
taaccttgcttctaataagtttttcgttaaatatagtcttctga

SEQ ID NO: 743 - DNA, 46 bp, Artificial sequence
  artificial DNA molecule for generation of DNA nanostructure
taatggttttttttaaataccgaccgtgtgaaaataattactagaa

SEQ ID NO: 744 - DNA, 32 bp, Artificial sequence
  artificial DNA molecule for generation of DNA nanostructure
gcggctggtaatgggtaaaggttttttagtga

SEQ ID NO: 745 - DNA, 50 bp, Artificial sequence
  artificial DNA molecule for generation of DNA nanostructure
atagccctaaaacattatttttgcgcgcgggcactgacggggaaagccgg

SEQ ID NO: 746 - DNA, 40 bp, Artificial sequence
  artificial DNA molecule for generation of DNA nanostructure
agaaaaataatatccctagcgaaccagagagaataacata

SEQ ID NO: 747 - DNA, 43 bp, Artificial sequence
  artificial DNA molecule for generation of DNA nanostructure
catcgtaaccgatctggtcagttgtagactttacaaacaattc

SEQ ID NO: 748 - DNA, 32 bp, Artificial sequence
  artificial DNA molecule for generation of DNA nanostructure
ccactacgaaggccggctacagaggctttgag

SEQ ID NO: 749 - DNA, 51 bp, Artificial sequence
  artificial DNA molecule for generation of DNA nanostructure
taaatgtgagcgataggtattaaatcctttgcccgaacgtgctccaaaagg

SEQ ID NO: 750 - DNA, 35 bp, Artificial sequence
  artificial DNA molecule for generation of DNA nanostructure
gggtcattgcaggcgctttcgcactcgtctcgtcg

SEQ ID NO: 751 - DNA, 22 bp, Artificial sequence
  artificial DNA molecule for generation of DNA nanostructure
ctggcagcctctgcgatgggcg

SEQ ID NO: 752 - DNA, 50 bp, Artificial sequence
  artificial DNA molecule for generation of DNA nanostructure
gactaaagactttaagaacaaaaatctacgttaagcaaatggagagctta

SEQ ID NO: 753 - DNA, 42 bp, Artificial sequence
  artificial DNA molecule for generation of DNA nanostructure
agcctttaattgtatcggtggaatcgtcatattcgaaagact

SEQ ID NO: 754 - DNA, 45 bp, Artificial sequence
  artificial DNA molecule for generation of DNA nanostructure
aggaagttggtagcaaaccaacctaaaggaattgcgaataataat

SEQ ID NO: 755 - DNA, 29 bp, Artificial sequence
  artificial DNA molecule for generation of DNA nanostructure
tttttcacgttgaaaaaaaagtattaatt

SEQ ID NO: 756 - DNA, 44 bp, Artificial sequence
  artificial DNA molecule for generation of DNA nanostructure
ttatcagcaaatccaaaatccaactttcaacagtttcagcggag

SEQ ID NO: 757 - DNA, 44 bp, Artificial sequence
  artificial DNA molecule for generation of DNA nanostructure
attttgctttgctttgaacaactaaaacgaaagaggcaaaagaa

SEQ ID NO: 758 - DNA, 43 bp, Artificial sequence
  artificial DNA molecule for generation of DNA nanostructure
gaacgagtcctttgtcatcattaaacgggtaaaatacgtaatg

SEQ ID NO: 759 - DNA, 45 bp, Artificial sequence
  artificial DNA molecule for generation of DNA nanostructure
tgagaatagaaagcgaggtgacagcatcgtttgccagcataaccc

SEQ ID NO: 760 - DNA, 44 bp, Artificial sequence
  artificial DNA molecule for generation of DNA nanostructure
tacactaaaacacacccccagctttaataacaacattattacag

SEQ ID NO: 761 - DNA, 35 bp, Artificial sequence
  artificial DNA molecule for generation of DNA nanostructure
caacgtaacaaagctgctcattcagaaatccgcga

SEQ ID NO: 762 - DNA, 50 bp, Artificial sequence
  artificial DNA molecule for generation of DNA nanostructure
ccatatttaacgagcgtctacagccatattatttgtagcgacggaaatta

SEQ ID NO: 763 - DNA, 22 bp, Artificial sequence
  artificial DNA molecule for generation of DNA nanostructure
cctgctccatgatccatagtta

SEQ ID NO: 764 - DNA, 42 bp, Artificial sequence
  artificial DNA molecule for generation of DNA nanostructure
aagacaaagaacgcgagaaaaagtaagcagactgataaaaga

SEQ ID NO: 765 - DNA, 32 bp, Artificial sequence
  artificial DNA molecule for generation of DNA nanostructure
ataagagaatataagggcttaattgagaatcg

SEQ ID NO: 766 - DNA, 43 bp, Artificial sequence
  artificial DNA molecule for generation of DNA nanostructure
gcgtaacgatcattatcatcatatgaaataaagaaattgcgta

SEQ ID NO: 767 - DNA, 51 bp, Artificial sequence
  artificial DNA molecule for generation of DNA nanostructure
agcccaataggaaaccggtttaacgtcagatgaatatacaaatccaatcgc

SEQ ID NO: 768 - DNA, 45 bp, Artificial sequence
  artificial DNA molecule for generation of DNA nanostructure
catgtaattcaacagtaagtaccgttaacctccggcttaggttgg

SEQ ID NO: 769 - DNA, 45 bp, Artificial sequence
  artificial DNA molecule for generation of DNA nanostructure
taggtctgagagaattttagtgtataaagagagcaagagagggta

SEQ ID NO: 770 - DNA, 43 bp, Artificial sequence
  artificial DNA molecule for generation of DNA nanostructure
ccaacgcttaacaaaataaggcagaggcattttcgagccagta

SEQ ID NO: 771 - DNA, 44 bp, Artificial sequence
  artificial DNA molecule for generation of DNA nanostructure
tccagacgacgaccatgttcacaattttgaaacgattttttgtt

SEQ ID NO: 772 - DNA, 44 bp, Artificial sequence
  artificial DNA molecule for generation of DNA nanostructure
aactttttgagaatgatgtatcaatagtgaatttatcaaaatca

SEQ ID NO: 773 - DNA, 44 bp, Artificial sequence
  artificial DNA molecule for generation of DNA nanostructure
gctgagaacaaatatctacctttacaaaaggtaaagtaattctg

SEQ ID NO: 774 - DNA, 29 bp, Artificial sequence
  artificial DNA molecule for generation of DNA nanostructure
gttatataactatctgatgcagtaacagt

SEQ ID NO: 775 - DNA, 35 bp, Artificial sequence
  artificial DNA molecule for generation of DNA nanostructure
gtattctaagaacgcgaggcgtttatcctaattta

SEQ ID NO: 776 - DNA, 43 bp, Artificial sequence
  artificial DNA molecule for generation of DNA nanostructure
tcgctattaatcaaaatcgcgcagagaggtgaggcggtcagta

SEQ ID NO: 777 - DNA, 35 bp, Artificial sequence
  artificial DNA molecule for generation of DNA nanostructure
gcctgcaacagtgccacgctgagacttcgctatta

SEQ ID NO: 778 - DNA, 50 bp, Artificial sequence
  artificial DNA molecule for generation of DNA nanostructure
tctcacggaaatgtgttcacctgcagccagcggttctatcagaatcctgt

SEQ ID NO: 779 - DNA, 42 bp, Artificial sequence
  artificial DNA molecule for generation of DNA nanostructure
cgccagctggcgaaaggggcatacgagccggtttcggtttgc

SEQ ID NO: 780 - DNA, 22 bp, Artificial sequence
  artificial DNA molecule for generation of DNA nanostructure
cgagcatgtagatagtaaatcg

SEQ ID NO: 781 - DNA, 32 bp, Artificial sequence
  artificial DNA molecule for generation of DNA nanostructure
ttgccgccagcagtccgtggtgaagggatagc

SEQ ID NO: 782 - DNA, 44 bp, Artificial sequence
  artificial DNA molecule for generation of DNA nanostructure
gatgtgctgcccggtgcgatagctttccggcaccgcttctggtg

SEQ ID NO: 783 - DNA, 29 bp, Artificial sequence
  artificial DNA molecule for generation of DNA nanostructure
actgttgggaagggcgggcctgccagcag

SEQ ID NO: 784 - DNA, 44 bp, Artificial sequence
  artificial DNA molecule for generation of DNA nanostructure
aatcccgtaaaaaaggcggccctttgcttcagacgatccagcgc

SEQ ID NO: 785 - DNA, 44 bp, Artificial sequence
  artificial DNA molecule for generation of DNA nanostructure
gcactccagcaaggcaaagcgccttgtgtacatcgacataaaaa

SEQ ID NO: 786 - DNA, 45 bp, Artificial sequence
  artificial DNA molecule for generation of DNA nanostructure
ccggaaaccaggcgattaagtgaatttgtatggtcattcttcgcg

SEQ ID NO: 787 - DNA, 45 bp, Artificial sequence
  artificial DNA molecule for generation of DNA nanostructure
cagaaacaagactttcttgggcggattcgccattcaggctgcgca

SEQ ID NO: 788 - DNA, 43 bp, Artificial sequence
  artificial DNA molecule for generation of DNA nanostructure
gagagatgcggcacaagccgatcaaacttaaatttctgctcat

SEQ ID NO: 789 - DNA, 46 bp, Artificial sequence
  artificial DNA molecule for generation of DNA nanostructure
ttaaatcagctctacagtttcgtccaactttgaaagcgctaatatc

SEQ ID NO: 790 - DNA, 47 bp, Artificial sequence
  artificial DNA molecule for generation of DNA nanostructure
taaatcaagattagttgctatttttaccagtaagagggtaattgaga

SEQ ID NO: 791 - DNA, 32 bp, Artificial sequence
  artificial DNA molecule for generation of DNA nanostructure
acctcccgacttgcgggaggttttagtaccga

SEQ ID NO: 792 - DNA, 40 bp, Artificial sequence
  artificial DNA molecule for generation of DNA nanostructure
ttatcctggatattcattacccaaatcttgacaagaaccg

SEQ ID NO: 793 - DNA, 52 bp, Artificial sequence
  artificial DNA molecule for generation of DNA nanostructure
gcctgagagtctggagcaaatagtttgaccattagaaagttcatcaagagta

SEQ ID NO: 794 - DNA, 48 bp, Artificial sequence
  artificial DNA molecule for generation of DNA nanostructure
tcagactgtagcgacacgtaatcagtagcgacgagcctaaacaaagtc

SEQ ID NO: 795 - DNA, 34 bp, Artificial sequence
  artificial DNA molecule for generation of DNA nanostructure
tggcgaaaatacaaagcggattgcatcaaaaaga

SEQ ID NO: 796 - DNA, 37 bp, Artificial sequence
  artificial DNA molecule for generation of DNA nanostructure
taattgctccttttttttgataagaggtcagattaga

SEQ ID NO: 797 - DNA, 39 bp, Artificial sequence
  artificial DNA molecule for generation of DNA nanostructure
ttgataagcaaatatcgaactgacaccagtacaaactac

SEQ ID NO: 798 - DNA, 49 bp, Artificial sequence
  artificial DNA molecule for generation of DNA nanostructure
tcatcgttttcatcggctgacggaagacaaaagagagagatcaatagct

SEQ ID NO: 799 - DNA, 48 bp, Artificial sequence
  artificial DNA molecule for generation of DNA nanostructure
attttcggtcataccatcaatatgcgtaaaactagcatgcctttagcg

SEQ ID NO: 800 - DNA, 50 bp, Artificial sequence
  artificial DNA molecule for generation of DNA nanostructure
ttttcagggatagcacaccctcatagaaaatcaaagccaccaccggaacc

SEQ ID NO: 801 - DNA, 40 bp, Artificial sequence
  artificial DNA molecule for generation of DNA nanostructure
ttgggaagggcgattttttggtgcgggcctcttcaggctg

SEQ ID NO: 802 - DNA, 48 bp, Artificial sequence
  artificial DNA molecule for generation of DNA nanostructure
agaacgagtagtaaattgtacaacggagttttttttgtatcataggga

SEQ ID NO: 803 - DNA, 40 bp, Artificial sequence
  artificial DNA molecule for generation of DNA nanostructure
cgcctgataaattgtgcagtgaatagatacataacgccaa

SEQ ID NO: 804 - DNA, 47 bp, Artificial sequence
  artificial DNA molecule for generation of DNA nanostructure
aaaaggggctgataaattaatgccggagtttttgggtagctattttt

SEQ ID NO: 805 - DNA, 33 bp, Artificial sequence
  artificial DNA molecule for generation of DNA nanostructure
gtaaagattcaatattttcgaacgagaggctgg

SEQ ID NO: 806 - DNA, 44 bp, Artificial sequence
  artificial DNA molecule for generation of DNA nanostructure
cacagacagccctaacaactttttatcgcccaccaattcttaaa

SEQ ID NO: 807 - DNA, 48 bp, Artificial sequence
  artificial DNA molecule for generation of DNA nanostructure
ttcgccattcgctattacgccagcaacgcctgtcgcattataaacgtt

SEQ ID NO: 808 - DNA, 51 bp, Artificial sequence
  artificial DNA molecule for generation of DNA nanostructure
ttcggttaccatagtaagagcaatttttactatcataaccctcgttgagat

SEQ ID NO: 809 - DNA, 36 bp, Artificial sequence
  artificial DNA molecule for generation of DNA nanostructure
ctggtaaagttttttttttcgtctttcccagcttga

SEQ ID NO: 810 - DNA, 33 bp, Artificial sequence
  artificial DNA molecule for generation of DNA nanostructure
ctgaccgaattacgaggttagccggaacgaggc

SEQ ID NO: 811 - DNA, 46 bp, Artificial sequence
  artificial DNA molecule for generation of DNA nanostructure
atcaaaaataaaagaagtatgttaaagtaagcaccctcacggccag

SEQ ID NO: 812 - DNA, 50 bp, Artificial sequence
  artificial DNA molecule for generation of DNA nanostructure
accctgtaattttttcttttgtattttaaatgtttttaatgcctctcaga

SEQ ID NO: 813 - DNA, 47 bp, Artificial sequence
  artificial DNA molecule for generation of DNA nanostructure
gaacggtgtacagaccaagggaacttaaattgaatttttgcctcata

SEQ ID NO: 814 - DNA, 32 bp, Artificial sequence
  artificial DNA molecule for generation of DNA nanostructure
gggagaatgttaagcccaacttctgacctaaa

SEQ ID NO: 815 - DNA, 48 bp, Artificial sequence
  artificial DNA molecule for generation of DNA nanostructure
cattagaccaaaaggtaagaataaacaccggagcaaatcctaagagca

SEQ ID NO: 816 - DNA, 35 bp, Artificial sequence
  artificial DNA molecule for generation of DNA nanostructure
accttgcttctgtaaagtggagccgccacgggaac

SEQ ID NO: 817 - DNA, 38 bp, Artificial sequence
  artificial DNA molecule for generation of DNA nanostructure
cgggagaagcctttactggccttacgccatcaaaaata

SEQ ID NO: 818 - DNA, 36 bp, Artificial sequence
  artificial DNA molecule for generation of DNA nanostructure
ccagctttgtcggattctctttacccttttttacta

SEQ ID NO: 819 - DNA, 40 bp, Artificial sequence
  artificial DNA molecule for generation of DNA nanostructure
tgccaagctttcagagtcgtcgctcgaacaaaagaaacaa

SEQ ID NO: 820 - DNA, 46 bp, Artificial sequence
  artificial DNA molecule for generation of DNA nanostructure
gtaacgcctgtgctgcaaggcgatttatagtcagaagggacctgta

SEQ ID NO: 821 - DNA, 48 bp, Artificial sequence
  artificial DNA molecule for generation of DNA nanostructure
gacaccacgtttaccagcgccaaaattattcacaccctgatttgccag

SEQ ID NO: 822 - DNA, 47 bp, Artificial sequence
  artificial DNA molecule for generation of DNA nanostructure
ccaccctcagaaccgcattcgcgttttcaacgacaattttttaacca

SEQ ID NO: 823 - DNA, 48 bp, Artificial sequence
  artificial DNA molecule for generation of DNA nanostructure
agtaccttgttaaaattagcattcgcagacggtcaatcataggcgcat

SEQ ID NO: 824 - DNA, 37 bp, Artificial sequence
  artificial DNA molecule for generation of DNA nanostructure
attcaactaatgcaaggcttgccctgacgagaaacac

SEQ ID NO: 825 - DNA, 47 bp, Artificial sequence
  artificial DNA molecule for generation of DNA nanostructure
gggcccatgtaccgtaacaccctttttaagaagcaaacggaaccgcc

SEQ ID NO: 826 - DNA, 46 bp, Artificial sequence
  artificial DNA molecule for generation of DNA nanostructure
tacatttcgcaaatggtttttcaataacctgtttagctattcatca

SEQ ID NO: 827 - DNA, 41 bp, Artificial sequence
  artificial DNA molecule for generation of DNA nanostructure
aagactccttattacgcaacgcaaatgaaatagaacccaca

SEQ ID NO: 828 - DNA, 47 bp, Artificial sequence
  artificial DNA molecule for generation of DNA nanostructure
gttgataatcagaattcaagagaatcgatgaacggtaatatattcaa

SEQ ID NO: 829 - DNA, 50 bp, Artificial sequence
  artificial DNA molecule for generation of DNA nanostructure
atattttcgaagtttcattccatataatttttagttgattcccaattctg

SEQ ID NO: 830 - DNA, 56 bp, Artificial sequence
  artificial DNA molecule for generation of DNA nanostructure
tgataaataaggcgttaaataaagtaattctgtccatttagcgaatccaaataaga

SEQ ID NO: 831 - DNA, 31 bp, Artificial sequence
  artificial DNA molecule for generation of DNA nanostructure
taccagtgttaccagaaggacaccagatagc

SEQ ID NO: 832 - DNA, 39 bp, Artificial sequence
  artificial DNA molecule for generation of DNA nanostructure
gagggaaggtttgtcaatcatatgtaccccgaatcttac

SEQ ID NO: 833 - DNA, 37 bp, Artificial sequence
  artificial DNA molecule for generation of DNA nanostructure
ttaaaggtagcagcactggcttttgatgatacaggag

SEQ ID NO: 834 - DNA, 48 bp, Artificial sequence
  artificial DNA molecule for generation of DNA nanostructure
ggcgacatggcaacattcaccggaaccagggataaaaattcagtcaaa

SEQ ID NO: 835 - DNA, 39 bp, Artificial sequence
  artificial DNA molecule for generation of DNA nanostructure
caggaagattgtaggggacagatcaacgctactacaatt

SEQ ID NO: 836 - DNA, 48 bp, Artificial sequence
  artificial DNA molecule for generation of DNA nanostructure
tagaaagccccaaaaaccgttctatgagaaaggccggagatttagaac

SEQ ID NO: 837 - DNA, 42 bp, Artificial sequence
  artificial DNA molecule for generation of DNA nanostructure
taccgattttttgttgcgccgacaattgtcgctgaggcttgc

SEQ ID NO: 838 - DNA, 49 bp, Artificial sequence
  artificial DNA molecule for generation of DNA nanostructure
tcaaccgatcagcccccttattagcgtttgccatcttccagcattgaca

SEQ ID NO: 839 - DNA, 56 bp, Artificial sequence
  artificial DNA molecule for generation of DNA nanostructure
gaatgcggcgggccgttttctgagtgagctaactcagttgagtgaaagggagcccc

SEQ ID NO: 840 - DNA, 40 bp, Artificial sequence
  artificial DNA molecule for generation of DNA nanostructure
atcgacataaaaaaatggtgtccaggaacggtgtgctttc

SEQ ID NO: 841 - DNA, 48 bp, Artificial sequence
  artificial DNA molecule for generation of DNA nanostructure
tagggcgcgtgcctaaacggtcataccgggggatcagatgcgtataac

SEQ ID NO: 842 - DNA, 35 bp, Artificial sequence
  artificial DNA molecule for generation of DNA nanostructure
ccagcttacggctggacccgtaaaaaaagccgcac

SEQ ID NO: 843 - DNA, 37 bp, Artificial sequence
  artificial DNA molecule for generation of DNA nanostructure
acgattttttgttagatatagaaggcttatccggtat

SEQ ID NO: 844 - DNA, 50 bp, Artificial sequence
  artificial DNA molecule for generation of DNA nanostructure
ccatcgatgaattatcaccgtcaccgatttttttgagccatttgggaatt

SEQ ID NO: 845 - DNA, 46 bp, Artificial sequence
  artificial DNA molecule for generation of DNA nanostructure
accattagcaaggccgtttttaaacgtcaccaatgaaacatattat

SEQ ID NO: 846 - DNA, 47 bp, Artificial sequence
  artificial DNA molecule for generation of DNA nanostructure
ttccttatcattccaattacgagcctcaagagccaggcggcaccaga

SEQ ID NO: 847 - DNA, 32 bp, Artificial sequence
  artificial DNA molecule for generation of DNA nanostructure
tggcaagttgctttgacgatgtcactgcgcgc

SEQ ID NO: 848 - DNA, 48 bp, Artificial sequence
  artificial DNA molecule for generation of DNA nanostructure
caatattctgaaacatcagaatgggacgattggccttgatagagccgc

SEQ ID NO: 849 - DNA, 39 bp, Artificial sequence
  artificial DNA molecule for generation of DNA nanostructure
gaaagtattaagtctggctgtctcactacgtaaaccgtc

SEQ ID NO: 850 - DNA, 36 bp, Artificial sequence
  artificial DNA molecule for generation of DNA nanostructure
gatatcaatatatttttttgagtgaatagacaaaga

SEQ ID NO: 851 - DNA, 33 bp, Artificial sequence
  artificial DNA molecule for generation of DNA nanostructure
caagtaagcagcctttacctgaacaagaaaaat

SEQ ID NO: 852 - DNA, 40 bp, Artificial sequence
  artificial DNA molecule for generation of DNA nanostructure
cccggaatttgtgatttttagatagactttctcgccatgt

SEQ ID NO: 853 - DNA, 37 bp, Artificial sequence
  artificial DNA molecule for generation of DNA nanostructure
gtcacaatcaattttttgaaaattcatatgggaataa

SEQ ID NO: 854 - DNA, 42 bp, Artificial sequence
  artificial DNA molecule for generation of DNA nanostructure
acgcgagtttttaaactttttcaaatatagtttgaaataccg

SEQ ID NO: 855 - DNA, 51 bp, Artificial sequence
  artificial DNA molecule for generation of DNA nanostructure
ttaatgagtcagagagaataacatttttaaaaacagggaagcgttatccca

SEQ ID NO: 856 - DNA, 47 bp, Artificial sequence
  artificial DNA molecule for generation of DNA nanostructure
tttcggaacctataatcggggtcagtgccttgagtaacaattaaagc

SEQ ID NO: 857 - DNA, 44 bp, Artificial sequence
  artificial DNA molecule for generation of DNA nanostructure
aattaccttttttttttagttttttaatttcattaaaatcgcaa

SEQ ID NO: 858 - DNA, 49 bp, Artificial sequence
  artificial DNA molecule for generation of DNA nanostructure
acgctcaaacaattaacaccgcctgcaacagtgccacatctttaggagc

SEQ ID NO: 859 - DNA, 48 bp, Artificial sequence
  artificial DNA molecule for generation of DNA nanostructure
acattttgcctgagtaagcaaatgaaaaaccaccaccctcattcacaa

SEQ ID NO: 860 - DNA, 39 bp, Artificial sequence
  artificial DNA molecule for generation of DNA nanostructure
tcgaggctgagactcatgtagaaacaaaattaattacat

SEQ ID NO: 861 - DNA, 48 bp, Artificial sequence
  artificial DNA molecule for generation of DNA nanostructure
tttattttggggttttttcatttgaatatcccatcctaatgaacgggt

SEQ ID NO: 862 - DNA, 46 bp, Artificial sequence
  artificial DNA molecule for generation of DNA nanostructure
ataagtgccgtcaactcaagaaaaccaatcaatagcgcttaatgcg

SEQ ID NO: 863 - DNA, 48 bp, Artificial sequence
  artificial DNA molecule for generation of DNA nanostructure
cggccttgggaaaaacgctcatggattcaccacacgctgctttggggt

SEQ ID NO: 864 - DNA, 41 bp, Artificial sequence
  artificial DNA molecule for generation of DNA nanostructure
tcacgcaaattaaccgtcaaactatctcgttaggggcgcgt

SEQ ID NO: 865 - DNA, 46 bp, Artificial sequence
  artificial DNA molecule for generation of DNA nanostructure
acttaaatagagacgcagaaacagcaataataacggaagtggaggt

SEQ ID NO: 866 - DNA, 36 bp, Artificial sequence
  artificial DNA molecule for generation of DNA nanostructure
tagtaccgaccctcagagcaaccgaggtttttaacg

SEQ ID NO: 867 - DNA, 47 bp, Artificial sequence
  artificial DNA molecule for generation of DNA nanostructure
aacggattcgcctgattgtatcaccaccctcaaatgagagggttgat

SEQ ID NO: 868 - DNA, 47 bp, Artificial sequence
  artificial DNA molecule for generation of DNA nanostructure
ggagaagatgatgaaacaaaggaggccgatttacttcttataccaag

SEQ ID NO: 869 - DNA, 50 bp, Artificial sequence
  artificial DNA molecule for generation of DNA nanostructure
gcctccctcatttttagccgcaccaccaccagtttttgccgccgttcata

SEQ ID NO: 870 - DNA, 38 bp, Artificial sequence
  artificial DNA molecule for generation of DNA nanostructure
caccctcagaaccgccgtactcaatagcccggaatagg

SEQ ID NO: 871 - DNA, 40 bp, Artificial sequence
  artificial DNA molecule for generation of DNA nanostructure
ttcagctaatgcagaaagcaaatctaacgtcaaaaatgaa

SEQ ID NO: 872 - DNA, 46 bp, Artificial sequence
  artificial DNA molecule for generation of DNA nanostructure
agccagcgaagaacttgtagcaaaaagggatagaggcgatgtgtac

SEQ ID NO: 873 - DNA, 48 bp, Artificial sequence
  artificial DNA molecule for generation of DNA nanostructure
acgtacagccgtggtgaagggatattaacaatgctcagtaaaggatta

SEQ ID NO: 874 - DNA, 33 bp, Artificial sequence
  artificial DNA molecule for generation of DNA nanostructure
gaggttgaggggattagcagagccagattaaac

SEQ ID NO: 875 - DNA, 47 bp, Artificial sequence
  artificial DNA molecule for generation of DNA nanostructure
caggtcaaaagcgcagtctctgaatttatttttcgttccagtaagcg

SEQ ID NO: 876 - DNA, 34 bp, Artificial sequence
  artificial DNA molecule for generation of DNA nanostructure
gctctcacataatacccaaaagaactggcatgat

SEQ ID NO: 877 - DNA, 39 bp, Artificial sequence
  artificial DNA molecule for generation of DNA nanostructure
gaaatggaaaacagttaatgccccctgcctacgatggcc

SEQ ID NO: 878 - DNA, 50 bp, Artificial sequence
  artificial DNA molecule for generation of DNA nanostructure
attattcatttcaattgctttgatgattagtgagtctaaagcatcacctt

SEQ ID NO: 879 - DNA, 48 bp, Artificial sequence
  artificial DNA molecule for generation of DNA nanostructure
tgaggcggtcagtaataaatcctcgtgcccgtataaaataccgaacga

SEQ ID NO: 880 - DNA, 37 bp, Artificial sequence
  artificial DNA molecule for generation of DNA nanostructure
gtcacacgcgcgaactattttaaaagtttgagtaaca

SEQ ID NO: 881 - DNA, 32 bp, Artificial sequence
  artificial DNA molecule for generation of DNA nanostructure
ttgttccagtttggaacaagagtcagcctggg

SEQ ID NO: 882 - DNA, 47 bp, Artificial sequence
  artificial DNA molecule for generation of DNA nanostructure
aaagaacgtggactccaacgtcaaaggatcccaccacacccgccatc

SEQ ID NO: 883 - DNA, 40 bp, Artificial sequence
  artificial DNA molecule for generation of DNA nanostructure
tatcagggtttattttcatcgtaggaacaagcaagccgtt

SEQ ID NO: 884 - DNA, 49 bp, Artificial sequence
  artificial DNA molecule for generation of DNA nanostructure
gttagataaaacagaggattggcagaaatacctccgctacaaatcagag

SEQ ID NO: 885 - DNA, 48 bp, Artificial sequence
  artificial DNA molecule for generation of DNA nanostructure
ctaagaacgcgaggcgtgacgacgacaatttttaaacaacatgaccgt

SEQ ID NO: 886 - DNA, 52 bp, Artificial sequence
  artificial DNA molecule for generation of DNA nanostructure
gtactggtaataagttttaacaccagtagcaccattaatccgcactcatcga

SEQ ID NO: 887 - DNA, 48 bp, Artificial sequence
  artificial DNA molecule for generation of DNA nanostructure
accaccagcagaattagatagccctaaaacattcaagtttgcgtaacc

SEQ ID NO: 888 - DNA, 31 bp, Artificial sequence
  artificial DNA molecule for generation of DNA nanostructure
cgttccgacgccagaatcctcgctttagaca

SEQ ID NO: 889 - DNA, 51 bp, Artificial sequence
  artificial DNA molecule for generation of DNA nanostructure
tgtgcaaatggaagggaagaaagtttttgaaaggagcgggcgcggaaccct

SEQ ID NO: 890 - DNA, 39 bp, Artificial sequence
  artificial DNA molecule for generation of DNA nanostructure
gtggtttttctgttttgccagagattgctgaaaccagac

SEQ ID NO: 891 - DNA, 37 bp, Artificial sequence
  artificial DNA molecule for generation of DNA nanostructure
gatttagagcttgcggcaaaatcccttataaatcaaa

SEQ ID NO: 892 - DNA, 39 bp, Artificial sequence
  artificial DNA molecule for generation of DNA nanostructure
atctggtccgagattttcaggttcatcctcataggtcac

SEQ ID NO: 893 - DNA, 50 bp, Artificial sequence
  artificial DNA molecule for generation of DNA nanostructure
gctgaacctctttttaatatcgaggaaggttatttttctaaaatgctgag

SEQ ID NO: 894 - DNA, 48 bp, Artificial sequence
  artificial DNA molecule for generation of DNA nanostructure
gtagcattaacatgatcgcgagctgaaaaggtactaacgggagaggct

SEQ ID NO: 895 - DNA, 36 bp, Artificial sequence
  artificial DNA molecule for generation of DNA nanostructure
gaaacaatttacaaaatcggagaagtgttttttttt

SEQ ID NO: 896 - DNA, 48 bp, Artificial sequence
  artificial DNA molecule for generation of DNA nanostructure
caggtcagtttttgcggatggctttaaagtacaaaatagcaacaacat

SEQ ID NO: 897 - DNA, 39 bp, Artificial sequence
  artificial DNA molecule for generation of DNA nanostructure
atatacagtaatgggataacggaacgtctttaaacagtt

SEQ ID NO: 898 - DNA, 31 bp, Artificial sequence
  artificial DNA molecule for generation of DNA nanostructure
gcaactgcaaaaatcaggtccgtgagaatga

SEQ ID NO: 899 - DNA, 48 bp, Artificial sequence
  artificial DNA molecule for generation of DNA nanostructure
taaacgatcgctggcagcctccgggctggtctcgtaaaaccctaccat

SEQ ID NO: 900 - DNA, 31 bp, Artificial sequence
  artificial DNA molecule for generation of DNA nanostructure
cagttgaaagaaattgcgtagctggacttgt

SEQ ID NO: 901 - DNA, 37 bp, Artificial sequence
  artificial DNA molecule for generation of DNA nanostructure
aggaattaaaccctcaatcaatccttttaccagatga

SEQ ID NO: 902 - DNA, 48 bp, Artificial sequence
  artificial DNA molecule for generation of DNA nanostructure
gtttaccacgattataatcgtcaccctcagcaaggtgaattactgcgg

SEQ ID NO: 903 - DNA, 41 bp, Artificial sequence
  artificial DNA molecule for generation of DNA nanostructure
taagaggaagcccgaaaaactccaataaatattagtaaaat

SEQ ID NO: 904 - DNA, 40 bp, Artificial sequence
  artificial DNA molecule for generation of DNA nanostructure
atatcgcgaacaaccccatcaacattaaatgttaacagta

SEQ ID NO: 905 - DNA, 46 bp, Artificial sequence
  artificial DNA molecule for generation of DNA nanostructure
gtggcacagacaatatttttttttgaatggctattagtactaaatc

SEQ ID NO: 906 - DNA, 37 bp, Artificial sequence
  artificial DNA molecule for generation of DNA nanostructure
caatattaccgctttttagccattgcaacactggtaa

SEQ ID NO: 907 - DNA, 39 bp, Artificial sequence
  artificial DNA molecule for generation of DNA nanostructure
ctggaataatggaaggcgccaggagaacgtcagcgtggt

SEQ ID NO: 908 - DNA, 39 bp, Artificial sequence
  artificial DNA molecule for generation of DNA nanostructure
ctcaacatttctgattatcagatgatggcaattgggaag

SEQ ID NO: 909 - DNA, 48 bp, Artificial sequence
  artificial DNA molecule for generation of DNA nanostructure
atccagaatatttgcaggtcagcaggggagaggcggtttgattgccct

SEQ ID NO: 910 - DNA, 52 bp, Artificial sequence
  artificial DNA molecule for generation of DNA nanostructure
tatcattttgcggaacaaaggaaagcgtaagaatacaacctgagagagttgc

SEQ ID NO: 911 - DNA, 50 bp, Artificial sequence
  artificial DNA molecule for generation of DNA nanostructure
ctttaatgaccagtaataaaagggacattttttctggccaacagagatag

SEQ ID NO: 912 - DNA, 47 bp, Artificial sequence
  artificial DNA molecule for generation of DNA nanostructure
ttcatcaatataacctaaaccaccagaaggagcggaatttattagac

SEQ ID NO: 913 - DNA, 44 bp, Artificial sequence
  artificial DNA molecule for generation of DNA nanostructure
gcaaccgcaagaaagacgatttttccagcgcaggcaccgggtta

SEQ ID NO: 914 - DNA, 32 bp, Artificial sequence
  artificial DNA molecule for generation of DNA nanostructure
gctaaatcggttgtggcaaatcaaaatacatt

SEQ ID NO: 915 - DNA, 46 bp, Artificial sequence
  artificial DNA molecule for generation of DNA nanostructure
gcataaacggaagcagacttcaacagaaaacgggaacaagcctcag

SEQ ID NO: 916 - DNA, 33 bp, Artificial sequence
  artificial DNA molecule for generation of DNA nanostructure
ctaacaactaatcaaaataacccttctcaccgc

SEQ ID NO: 917 - DNA, 34 bp, Artificial sequence
  artificial DNA molecule for generation of DNA nanostructure
ccagagcataaccaccgagtaaaagagtctgtcc

SEQ ID NO: 918 - DNA, 40 bp, Artificial sequence
  artificial DNA molecule for generation of DNA nanostructure
gcaaacgcggtccgttttttttttcgtctcgtgctgattg

SEQ ID NO: 919 - DNA, 47 bp, Artificial sequence
  artificial DNA molecule for generation of DNA nanostructure
atagattcaattcgacaactcgtattaattttttcctttgcccgaac

SEQ ID NO: 920 - DNA, 33 bp, Artificial sequence
  artificial DNA molecule for generation of DNA nanostructure
ctggccgtggcgagaaagaatcggccaacgcgc

SEQ ID NO: 921 - DNA, 49 bp, Artificial sequence
  artificial DNA molecule for generation of DNA nanostructure
gagaccaataaatcatatatgcaacagagcttaggggtaatcattgaat

SEQ ID NO: 922 - DNA, 48 bp, Artificial sequence
  artificial DNA molecule for generation of DNA nanostructure
caggcaaggcaaaggatttagaagatcatcatattcctactaatagta

SEQ ID NO: 923 - DNA, 49 bp, Artificial sequence
  artificial DNA molecule for generation of DNA nanostructure
atataatgtgagaattagcaaaattaagcaataaagcgagtaatgtgta

SEQ ID NO: 924 - DNA, 50 bp, Artificial sequence
  artificial DNA molecule for generation of DNA nanostructure
acggcggattgaccggagcgagtttttaattagttaccaaaaacattatg

SEQ ID NO: 925 - DNA, 56 bp, Artificial sequence
  artificial DNA molecule for generation of DNA nanostructure
ttaaaggccgcttttgcgggccaagcgcgaaacaaagggcttgattaggaatacca

SEQ ID NO: 926 - DNA, 48 bp, Artificial sequence
  artificial DNA molecule for generation of DNA nanostructure
gaatagcccgagataggcattaattgcgttttttgcgctcactcggcc

SEQ ID NO: 927 - DNA, 40 bp, Artificial sequence
  artificial DNA molecule for generation of DNA nanostructure
tcaggacgtggtttgccccagcagagcaagcggtccacgc

SEQ ID NO: 928 - DNA, 32 bp, Artificial sequence
  artificial DNA molecule for generation of DNA nanostructure
gatggtttaatttcaactttaatcacccccag

SEQ ID NO: 929 - DNA, 40 bp, Artificial sequence
  artificial DNA molecule for generation of DNA nanostructure
gcccgctttccagtcgtccgaaatacggggaaagccggcg

SEQ ID NO: 930 - DNA, 47 bp, Artificial sequence
  artificial DNA molecule for generation of DNA nanostructure
attaccttatgcgattttaagaactaaagacttttgcaaaagaattt

SEQ ID NO: 931 - DNA, 40 bp, Artificial sequence
  artificial DNA molecule for generation of DNA nanostructure
agacgggcaacagctgcgtattggggttagaaagaaataa

SEQ ID NO: 932 - DNA, 46 bp, Artificial sequence
  artificial DNA molecule for generation of DNA nanostructure
accgtgcagttggtgtagatgggcataatcagtgaggcgtatcggg

SEQ ID NO: 933 - DNA, 40 bp, Artificial sequence
  artificial DNA molecule for generation of DNA nanostructure
gaagatcgcactccagattttctgccataaataatcgtca

SEQ ID NO: 934 - DNA, 35 bp, Artificial sequence
  artificial DNA molecule for generation of DNA nanostructure
agacgttagtaaatgaccagctttccggcaccgct

SEQ ID NO: 935 - DNA, 39 bp, Artificial sequence
  artificial DNA molecule for generation of DNA nanostructure
gattatacttcttagcaccagtgaaaaatcttataccag

SEQ ID NO: 936 - DNA, 36 bp, Artificial sequence
  artificial DNA molecule for generation of DNA nanostructure
ggcgggtggtgccttttttcccacgcaacctgcagc

SEQ ID NO: 937 - DNA, 37 bp, Artificial sequence
  artificial DNA molecule for generation of DNA nanostructure
ggtgtctgatttggggctacaaaggctatcaggtcat

SEQ ID NO: 938 - DNA, 42 bp, Artificial sequence
  artificial DNA molecule for generation of DNA nanostructure
cagcggttttttccggtgccccctgcattctctgtggtgctg

SEQ ID NO: 939 - DNA, 32 bp, Artificial sequence
  artificial DNA molecule for generation of DNA nanostructure
gacgacgatggatagcgtcgcataaccgatat

SEQ ID NO: 940 - DNA, 40 bp, Artificial sequence
  artificial DNA molecule for generation of DNA nanostructure
tgatcctgattgtttgtttacaaaagagccgtcaatagat

SEQ ID NO: 941 - DNA, 50 bp, Artificial sequence
  artificial DNA molecule for generation of DNA nanostructure
atacaaattctgcacccagacgagcgtctttccaagaatcaagtaaatat

SEQ ID NO: 942 - DNA, 51 bp, Artificial sequence
  artificial DNA molecule for generation of DNA nanostructure
agcccaataggaaggaagggttttcccagtcacgacgttgcctttttaacc

SEQ ID NO: 943 - DNA, 43 bp, Artificial sequence
  artificial DNA molecule for generation of DNA nanostructure
gcgtaacgatctgccggaaaccaggcaaagcgccataagttgg

SEQ ID NO: 944 - DNA, 35 bp, Artificial sequence
  artificial DNA molecule for generation of DNA nanostructure
atcaacgtaacaaagctgctcatttcgaaatccgc

SEQ ID NO: 945 - DNA, 22 bp, Artificial sequence
  artificial DNA molecule for generation of DNA nanostructure
gacctgctccagaccatagtta

SEQ ID NO: 946 - DNA, 42 bp, Artificial sequence
  artificial DNA molecule for generation of DNA nanostructure
tccggcttaggttgggttaatcttaccgaagctgataaaggt

SEQ ID NO: 947 - DNA, 32 bp, Artificial sequence
  artificial DNA molecule for generation of DNA nanostructure
atcgccatatttagtttagtatcatatgcgtt

SEQ ID NO: 948 - DNA, 29 bp, Artificial sequence
  artificial DNA molecule for generation of DNA nanostructure
atttatcaaaatcagagactataaaacga

SEQ ID NO: 949 - DNA, 45 bp, Artificial sequence
  artificial DNA molecule for generation of DNA nanostructure
taaagccaaaaagcctacaacgccgctgagaagagtcaatagtga

SEQ ID NO: 950 - DNA, 45 bp, Artificial sequence
  artificial DNA molecule for generation of DNA nanostructure
agcgatagcttagatgctgatatcataatagaattgataactgaa

SEQ ID NO: 951 - DNA, 44 bp, Artificial sequence
  artificial DNA molecule for generation of DNA nanostructure
tataactaatttctgataggttcccttagaatccttgaaaacat

SEQ ID NO: 952 - DNA, 43 bp, Artificial sequence
  artificial DNA molecule for generation of DNA nanostructure
tactagaacgaagagtaatctcaacagtagggcttaattgaga

SEQ ID NO: 953 - DNA, 44 bp, Artificial sequence
  artificial DNA molecule for generation of DNA nanostructure
attaattatatgtaaattaagacaacatgtaatttaggcagagg

SEQ ID NO: 954 - DNA, 44 bp, Artificial sequence
  artificial DNA molecule for generation of DNA nanostructure
cattttcgagccagaatataagaagcctttacaaaataaacagc

SEQ ID NO: 955 - DNA, 51 bp, Artificial sequence
  artificial DNA molecule for generation of DNA nanostructure
tacctgagcaaaaaaattctgctcatttgccgccagcagtttgctcgtcat

SEQ ID NO: 956 - DNA, 43 bp, Artificial sequence
  artificial DNA molecule for generation of DNA nanostructure
cagtacataaaacctcaccggaaacaatcggcgaacggatcaa

SEQ ID NO: 957 - DNA, 42 bp, Artificial sequence
  artificial DNA molecule for generation of DNA nanostructure
aaacatcccttacactggtcgggagctaaacacaatcacttg

SEQ ID NO: 958 - DNA, 35 bp, Artificial sequence
  artificial DNA molecule for generation of DNA nanostructure
gaatcattaccgcgcccaatagcacgcgcctgttt

SEQ ID NO: 959 - DNA, 22 bp, Artificial sequence
  artificial DNA molecule for generation of DNA nanostructure
atcaacaatagataaatggaaa

SEQ ID NO: 960 - DNA, 32 bp, Artificial sequence
  artificial DNA molecule for generation of DNA nanostructure
gctgtttcctgtgtcttcgcgtccgtgagcct

SEQ ID NO: 961 - DNA, 50 bp, Artificial sequence
  artificial DNA molecule for generation of DNA nanostructure
cctcacagttgagggcgaagaaccatcacccaaacgccattattatttac

SEQ ID NO: 962 - DNA, 45 bp, Artificial sequence
  artificial DNA molecule for generation of DNA nanostructure
cgggtaccgtgcctgttgaaattggtatgagccgggtcactgttg

SEQ ID NO: 963 - DNA, 43 bp, Artificial sequence
  artificial DNA molecule for generation of DNA nanostructure
agcacgcgagcataggaagctcgaattcgtaatcatggtcata

SEQ ID NO: 964 - DNA, 44 bp, Artificial sequence
  artificial DNA molecule for generation of DNA nanostructure
caacatacgagccaagtgtaacactattcgaggtgccgtaaagc

SEQ ID NO: 965 - DNA, 45 bp, Artificial sequence
  artificial DNA molecule for generation of DNA nanostructure
aatccgccgggcgttaacggctttctgccactatggtgtagcggt

SEQ ID NO: 966 - DNA, 29 bp, Artificial sequence
  artificial DNA molecule for generation of DNA nanostructure
ccctgcggctggtaggtttcttgggcggt

SEQ ID NO: 967 - DNA, 44 bp, Artificial sequence
  artificial DNA molecule for generation of DNA nanostructure
gtgttcagggggtaaaatgggtcattgcaggcgctttcgcactc

SEQ ID NO: 968 - DNA, 44 bp, Artificial sequence
  artificial DNA molecule for generation of DNA nanostructure
gcatcagccaaatcgcggttgcgttatccgctcacaattccaca

SEQ ID NO: 969 - DNA, 35 bp, Artificial sequence
  artificial DNA molecule for generation of DNA nanostructure
gcgaaaatcctgtttgatggtggtggaaacctgtc

SEQ ID NO: 970 - DNA, 22 bp, Artificial sequence
  artificial DNA molecule for generation of DNA nanostructure
gtgccagctgcatctgccaacg

SEQ ID NO: 971 - DNA, 35 bp, Artificial sequence
  artificial DNA molecule for generation of DNA nanostructure
tctgccagtttgaggggacgacgaaaaaaggctcc

SEQ ID NO: 972 - DNA, 43 bp, Artificial sequence
  artificial DNA molecule for generation of DNA nanostructure
gcagcaccgtcgcctttagtgatgaagggtaaagtgcatcgta

SEQ ID NO: 973 - DNA, 32 bp, Artificial sequence
  artificial DNA molecule for generation of DNA nanostructure
acgtaatgccactggtagcaacggctacagag

SEQ ID NO: 974 - DNA, 42 bp, Artificial sequence
  artificial DNA molecule for generation of DNA nanostructure
aaaaggagcctttaattgtccccctcaaatggcctcaaagcg

SEQ ID NO: 975 - DNA, 50 bp, Artificial sequence
  artificial DNA molecule for generation of DNA nanostructure
gctttgaggactggctcatacgttaataaaacgaggcatcaagttttaaa

SEQ ID NO: 976 - DNA, 45 bp, Artificial sequence
  artificial DNA molecule for generation of DNA nanostructure
ttttcatgggaacgagacgaaggcacaactaaaggaattgcgaat

SEQ ID NO: 977 - DNA, 43 bp, Artificial sequence
  artificial DNA molecule for generation of DNA nanostructure
cagcatcaggcacttaaaaaagtttccattaaacgggtaaaat

SEQ ID NO: 978 - DNA, 44 bp, Artificial sequence
  artificial DNA molecule for generation of DNA nanostructure
caaaagaatacaccatctttgattgtgatattacaggtagaaag

SEQ ID NO: 979 - DNA, 29 bp, Artificial sequence
  artificial DNA molecule for generation of DNA nanostructure
aataattttttcatctccaaacagtatcg

SEQ ID NO: 980 - DNA, 44 bp, Artificial sequence
  artificial DNA molecule for generation of DNA nanostructure
tatgggatatcagctagaaaggaaccaacctaaaacgaaagagg

SEQ ID NO: 981 - DNA, 45 bp, Artificial sequence
  artificial DNA molecule for generation of DNA nanostructure
gcggagtgagaattgctttcggcgaaagagtttagactaaaaacc

SEQ ID NO: 982 - DNA, 44 bp, Artificial sequence
  artificial DNA molecule for generation of DNA nanostructure
atcggttttttaaaacgttggctaaacaactttcaacagtttca

SEQ ID NO: 983 - DNA, 46 bp, Artificial sequence
  artificial DNA molecule for generation of DNA nanostructure
gcagaggcataacggaaactacaattagcgtaataaacaccagaat

SEQ ID NO: 984 - DNA, 48 bp, Artificial sequence
  artificial DNA molecule for generation of DNA nanostructure
cagttgagcctgtcgtagagagtttacgagccccgtggtggttccgaa

SEQ ID NO: 985 - DNA, 47 bp, Artificial sequence
  artificial DNA molecule for generation of DNA nanostructure
gagcttgacgatggcctttggggtcgaggtgggaagcatacaattcc

SEQ ID NO: 986 - DNA, 44 bp, Artificial sequence
  artificial DNA molecule for generation of DNA nanostructure
cgcgcttaatgcgccgctacgaatcagaatcggaacatccgctc

SEQ ID NO: 987 - DNA, 38 bp, Artificial sequence
  artificial DNA molecule for generation of DNA nanostructure
cgttttcagacagctacagtaacagtagaattgtttaa

SEQ ID NO: 988 - DNA, 43 bp, Artificial sequence
  artificial DNA molecule for generation of DNA nanostructure
taacgagcgttagattttgcacctttttagctacagaacgcga

SEQ ID NO: 989 - DNA, 48 bp, Artificial sequence
  artificial DNA molecule for generation of DNA nanostructure
gatgaatacctcatagcgcctgtagcattccacctcatttcatttcaa

SEQ ID NO: 990 - DNA, 39 bp, Artificial sequence
  artificial DNA molecule for generation of DNA nanostructure
gagataaagaaattgacgtataacactgagtacatgaaa

SEQ ID NO: 991 - DNA, 47 bp, Artificial sequence
  artificial DNA molecule for generation of DNA nanostructure
cgtcttttagaaaattatttgcagcattagaagaataacgataaccc

SEQ ID NO: 992 - DNA, 48 bp, Artificial sequence
  artificial DNA molecule for generation of DNA nanostructure
ttcgcctgttcaggttttacagagcggcaataataagagctcacggaa

SEQ ID NO: 993 - DNA, 43 bp, Artificial sequence
  artificial DNA molecule for generation of DNA nanostructure
gtgagaatgtcatacatggtttttttttgatgatacaggagtg

SEQ ID NO: 994 - DNA, 39 bp, Artificial sequence
  artificial DNA molecule for generation of DNA nanostructure
ccgatttacttctgaaatttctgctcatttgccgccagc

SEQ ID NO: 995 - DNA, 48 bp, Artificial sequence
  artificial DNA molecule for generation of DNA nanostructure
aaaatcgcgcaagcaaatcagtaaattaccgcgcccaatagaaaccaa

SEQ ID NO: 996 - DNA, 40 bp, Artificial sequence
  artificial DNA molecule for generation of DNA nanostructure
ttctccgtggtgaagggcaaatgaattttctgttcagcgg

SEQ ID NO: 997 - DNA, 48 bp, Artificial sequence
  artificial DNA molecule for generation of DNA nanostructure
atcaagaagaattaccttttttaatggaaacaacaagaaagcaaaaga

SEQ ID NO: 998 - DNA, 48 bp, Artificial sequence
  artificial DNA molecule for generation of DNA nanostructure
aatcctgacagatgatggcaattcaacaactttactggtaacgtttgt

SEQ ID NO: 999 - DNA, 42 bp, Artificial sequence
  artificial DNA molecule for generation of DNA nanostructure
ccaagctttcagaggtggagccgccatttttgggaacggata

SEQ ID NO: 1000 - DNA, 48 bp, Artificial sequence
  artificial DNA molecule for generation of DNA nanostructure
atataagtggataagtgccgtcgacaatactttatcggcctaatcagt

SEQ ID NO: 1001 - DNA, 40 bp, Artificial sequence
  artificial DNA molecule for generation of DNA nanostructure
ggaaacaatcggcgaagatagctcaagaaacacggaattt

SEQ ID NO: 1002 - DNA, 48 bp, Artificial sequence
  artificial DNA molecule for generation of DNA nanostructure
caagttactgcggccagcgcgcctgtgcactctttaacaaagcatgta

SEQ ID NO: 1003 - DNA, 49 bp, Artificial sequence
  artificial DNA molecule for generation of DNA nanostructure
ataagttttaacgttgacgctcaactgattatttgtttggatttggcaa

SEQ ID NO: 1004 - DNA, 31 bp, Artificial sequence
  artificial DNA molecule for generation of DNA nanostructure
agagccaccaccatcggcattttttttcggt

SEQ ID NO: 1005 - DNA, 31 bp, Artificial sequence
  artificial DNA molecule for generation of DNA nanostructure
taatggaagggttagatcaatatttgctttg

SEQ ID NO: 1006 - DNA, 48 bp, Artificial sequence
  artificial DNA molecule for generation of DNA nanostructure
agggcgaaaaaccgtcagttgggcaaggagcgggcgctagggcgcata

SEQ ID NO: 1007 - DNA, 40 bp, Artificial sequence
  artificial DNA molecule for generation of DNA nanostructure
tatcagggcggggaaaagcactaagcgggagcagacagga

SEQ ID NO: 1008 - DNA, 46 bp, Artificial sequence
  artificial DNA molecule for generation of DNA nanostructure
attgggtcagtgccttgagtaacatatttcggttcgtcaacccatg

SEQ ID NO: 1009 - DNA, 47 bp, Artificial sequence
  artificial DNA molecule for generation of DNA nanostructure
gcaatagctatcttacacctcacctgaatttttttatcaccgtcacc

SEQ ID NO: 1010 - DNA, 40 bp, Artificial sequence
  artificial DNA molecule for generation of DNA nanostructure
cgaagccctttttatttttgaaaagtaagcagatagccga

SEQ ID NO: 1011 - DNA, 40 bp, Artificial sequence
  artificial DNA molecule for generation of DNA nanostructure
aacaaaattaattacatgtatcacagcaagcctaggatta

SEQ ID NO: 1012 - DNA, 47 bp, Artificial sequence
  artificial DNA molecule for generation of DNA nanostructure
tcaacagttatgggattttgctaaacctaccatatcactaaagagac

SEQ ID NO: 1013 - DNA, 38 bp, Artificial sequence
  artificial DNA molecule for generation of DNA nanostructure
tcattaaaggccgccgccagctttttttgacaggaggt

SEQ ID NO: 1014 - DNA, 47 bp, Artificial sequence
  artificial DNA molecule for generation of DNA nanostructure
gttaatgccccctgccgtgcccgtacgatctaaagtagccgtagatt

SEQ ID NO: 1015 - DNA, 40 bp, Artificial sequence
  artificial DNA molecule for generation of DNA nanostructure
gtattctggtaatatcatacctaccctcgttaagggcgcg

SEQ ID NO: 1016 - DNA, 48 bp, Artificial sequence
  artificial DNA molecule for generation of DNA nanostructure
cagaacaaacggtacggaggccacgctcgaatgtcataccccctgcat

SEQ ID NO: 1017 - DNA, 40 bp, Artificial sequence
  artificial DNA molecule for generation of DNA nanostructure
aataagaaccgacttgcgggaggtaatagataagtcctga

SEQ ID NO: 1018 - DNA, 47 bp, Artificial sequence
  artificial DNA molecule for generation of DNA nanostructure
gaatgcggcgggccggagggttgtgtttttattgaagaggctgagac

SEQ ID NO: 1019 - DNA, 35 bp, Artificial sequence
  artificial DNA molecule for generation of DNA nanostructure
cttctgtaacagaacgcgcctgtttttttatcaac

SEQ ID NO: 1020 - DNA, 45 bp, Artificial sequence
  artificial DNA molecule for generation of DNA nanostructure
aaagtgtctgcccgctttccagcggtgccgggggtttctgccagc

SEQ ID NO: 1021 - DNA, 39 bp, Artificial sequence
  artificial DNA molecule for generation of DNA nanostructure
tcctcaagtaccaggcatagcccggaataggtgtggtgc

SEQ ID NO: 1022 - DNA, 39 bp, Artificial sequence
  artificial DNA molecule for generation of DNA nanostructure
tagaagaactcaaacctttgattaaattaaccgttgtag

SEQ ID NO: 1023 - DNA, 39 bp, Artificial sequence
  artificial DNA molecule for generation of DNA nanostructure
aatgagtggaagtttcctgtgtgctgagaagcgtgcttt

SEQ ID NO: 1024 - DNA, 40 bp, Artificial sequence
  artificial DNA molecule for generation of DNA nanostructure
ttctaagagagaaacagaattatttcagggatcgtactca

SEQ ID NO: 1025 - DNA, 43 bp, Artificial sequence
  artificial DNA molecule for generation of DNA nanostructure
tttgatttttagccttaaatcattatttatttttcccaatcca

SEQ ID NO: 1026 - DNA, 48 bp, Artificial sequence
  artificial DNA molecule for generation of DNA nanostructure
cacccttttttagaaccgccacccactatatgtattttagaataaaca

SEQ ID NO: 1027 - DNA, 34 bp, Artificial sequence
  artificial DNA molecule for generation of DNA nanostructure
gggaattttttagagccaacgtacagcgccaagg

SEQ ID NO: 1028 - DNA, 47 bp, Artificial sequence
  artificial DNA molecule for generation of DNA nanostructure
gcagaaacagcggatcagggaagccgtaaaacagaaccctactatgg

SEQ ID NO: 1029 - DNA, 40 bp, Artificial sequence
  artificial DNA molecule for generation of DNA nanostructure
agaaccacggaggtttagtaccgcaaacaaacttacctga

SEQ ID NO: 1030 - DNA, 47 bp, Artificial sequence
  artificial DNA molecule for generation of DNA nanostructure
caccagagcggggttttgctcagagaaggatcaataggaccagtaca

SEQ ID NO: 1031 - DNA, 43 bp, Artificial sequence
  artificial DNA molecule for generation of DNA nanostructure
aataatatcgttttagcgaacctcacgatttttcttaccaacg

SEQ ID NO: 1032 - DNA, 48 bp, Artificial sequence
  artificial DNA molecule for generation of DNA nanostructure
ttattcattaatgtttaccagtccatgaaatacgtcaaaaatgaaaat

SEQ ID NO: 1033 - DNA, 44 bp, Artificial sequence
  artificial DNA molecule for generation of DNA nanostructure
atcgtcgcgatgcaaatcctttttatcgcaagacaaagatgatg

SEQ ID NO: 1034 - DNA, 43 bp, Artificial sequence
  artificial DNA molecule for generation of DNA nanostructure
agcggtgctcgggaaagatccccgacacaacagcagcaagcgg

SEQ ID NO: 1035 - DNA, 47 bp, Artificial sequence
  artificial DNA molecule for generation of DNA nanostructure
cagacgatccagcgcaaattgcgtatggtcatagcttactaccgtaa

SEQ ID NO: 1036 - DNA, 39 bp, Artificial sequence
  artificial DNA molecule for generation of DNA nanostructure
gtacataaatcaatatatgtgagtgattttttaaccttg

SEQ ID NO: 1037 - DNA, 40 bp, Artificial sequence
  artificial DNA molecule for generation of DNA nanostructure
caagtaccgcactcattaggaatcctcacattgtgtcact

SEQ ID NO: 1038 - DNA, 40 bp, Artificial sequence
  artificial DNA molecule for generation of DNA nanostructure
agaacgggatccggtaagcagccttaacgtcagtgagaga

SEQ ID NO: 1039 - DNA, 42 bp, Artificial sequence
  artificial DNA molecule for generation of DNA nanostructure
tcctcactgttctttttttgcgtccgtgagccgggtcactgt

SEQ ID NO: 1040 - DNA, 40 bp, Artificial sequence
  artificial DNA molecule for generation of DNA nanostructure
gggcgcggggtttgcgagtgagacgggcaacaaaaagaat

SEQ ID NO: 1041 - DNA, 37 bp, Artificial sequence
  artificial DNA molecule for generation of DNA nanostructure
cgcatcggacagtatcggcctcaggaagataatattc

SEQ ID NO: 1042 - DNA, 50 bp, Artificial sequence
  artificial DNA molecule for generation of DNA nanostructure
gttcagcaaatcgttaactttttgcatcagatgccgggttacctgcagcc

SEQ ID NO: 1043 - DNA, 46 bp, Artificial sequence
  artificial DNA molecule for generation of DNA nanostructure
cataaacatcccttacactggtgtggagaggcttgcggtatgagcc

SEQ ID NO: 1044 - DNA, 40 bp, Artificial sequence
  artificial DNA molecule for generation of DNA nanostructure
ttgctcgtggctggtaatgggtaaaaatatcaatctttag

SEQ ID NO: 1045 - DNA, 39 bp, Artificial sequence
  artificial DNA molecule for generation of DNA nanostructure
tccatgttataagggaaccgaacaaaaatctcccaattc

SEQ ID NO: 1046 - DNA, 39 bp, Artificial sequence
  artificial DNA molecule for generation of DNA nanostructure
gtgtagcggtttttcacgctgcgttttttcgtctcgggg

SEQ ID NO: 1047 - DNA, 40 bp, Artificial sequence
  artificial DNA molecule for generation of DNA nanostructure
tcagcgggggtcaatcacttagccggaacgagaggtttct

SEQ ID NO: 1048 - DNA, 38 bp, Artificial sequence
  artificial DNA molecule for generation of DNA nanostructure
gacaatatctggccaaaagaatacaatagatacaacta

SEQ ID NO: 1049 - DNA, 49 bp, Artificial sequence
  artificial DNA molecule for generation of DNA nanostructure
ttgcccgcaatagattaaaagcatcgagccagcagcaaatggtttagct

SEQ ID NO: 1050 - DNA, 48 bp, Artificial sequence
  artificial DNA molecule for generation of DNA nanostructure
ccgcctgcaacagtgcgaagataagagcactaaatacattttacggct

SEQ ID NO: 1051 - DNA, 37 bp, Artificial sequence
  artificial DNA molecule for generation of DNA nanostructure
gccagctgcattaatgattttttcggccaacgcgcgg

SEQ ID NO: 1052 - DNA, 47 bp, Artificial sequence
  artificial DNA molecule for generation of DNA nanostructure
acggcggattgaccgtagaaaccacaccagtcaggccgaacgttatt

SEQ ID NO: 1053 - DNA, 38 bp, Artificial sequence
  artificial DNA molecule for generation of DNA nanostructure
atcaatatctggtcagttggtttttaaatcacgcgtgc

SEQ ID NO: 1054 - DNA, 44 bp, Artificial sequence
  artificial DNA molecule for generation of DNA nanostructure
cgattaatttttgggatttttaaacatttttgaggctacaaaca

SEQ ID NO: 1055 - DNA, 30 bp, Artificial sequence
  artificial DNA molecule for generation of DNA nanostructure
tagaagtaccattgctgaggcggtccctga

SEQ ID NO: 1056 - DNA, 42 bp, Artificial sequence
  artificial DNA molecule for generation of DNA nanostructure
ggtaccgacgagtaaaagagtagttgatttttaggaattgag

SEQ ID NO: 1057 - DNA, 32 bp, Artificial sequence
  artificial DNA molecule for generation of DNA nanostructure
tagtagcatgcgaacgcatataacccagaacg

SEQ ID NO: 1058 - DNA, 47 bp, Artificial sequence
  artificial DNA molecule for generation of DNA nanostructure
ttaataccgaacgaaccaccagcacacgctgaaccttgctgaacctc

SEQ ID NO: 1059 - DNA, 47 bp, Artificial sequence
  artificial DNA molecule for generation of DNA nanostructure
aacagaggtctgacctgaaagcgtcagagatataaatcctttgctca

SEQ ID NO: 1060 - DNA, 48 bp, Artificial sequence
  artificial DNA molecule for generation of DNA nanostructure
agtagattctgctcattttgaaagattgtgtcgaaatccgcgacctgc

SEQ ID NO: 1061 - DNA, 36 bp, Artificial sequence
  artificial DNA molecule for generation of DNA nanostructure
agccagctttccgcaataaccagacgacgataaaaa

SEQ ID NO: 1062 - DNA, 44 bp, Artificial sequence
  artificial DNA molecule for generation of DNA nanostructure
caggtagaaagattcatcagtgaattaccttatgcgaaacaaag

SEQ ID NO: 1063 - DNA, 41 bp, Artificial sequence
  artificial DNA molecule for generation of DNA nanostructure
aggacagatgaacggtagcagatacatttcgcatttggggc

SEQ ID NO: 1064 - DNA, 40 bp, Artificial sequence
  artificial DNA molecule for generation of DNA nanostructure
atcgccattaaaaacactgatagcggctattagtctttaa

SEQ ID NO: 1065 - DNA, 48 bp, Artificial sequence
  artificial DNA molecule for generation of DNA nanostructure
gcgcagacgtcattgcaggcgcttcaaccagctgaggattactcgtat

SEQ ID NO: 1066 - DNA, 48 bp, Artificial sequence
  artificial DNA molecule for generation of DNA nanostructure
tattactttttgccagttagacttgaaggttaaatccgcctgccctgc

SEQ ID NO: 1067 - DNA, 42 bp, Artificial sequence
  artificial DNA molecule for generation of DNA nanostructure
cttataaatcgctgattgccctttttttaccgcctggccctg

SEQ ID NO: 1068 - DNA, 51 bp, Artificial sequence
  artificial DNA molecule for generation of DNA nanostructure
tggtcagcagcaaccgagcacatcaattttaaaagttaaccaccacacccg

SEQ ID NO: 1069 - DNA, 40 bp, Artificial sequence
  artificial DNA molecule for generation of DNA nanostructure
cctcgtttctgcggaatcgtcatacgcactccgcccgaaa

SEQ ID NO: 1070 - DNA, 47 bp, Artificial sequence
  artificial DNA molecule for generation of DNA nanostructure
tgctggtcggaggtgtccatgacgagaaacaagttgattgatggctt

SEQ ID NO: 1071 - DNA, 39 bp, Artificial sequence
  artificial DNA molecule for generation of DNA nanostructure
caggcgcatacaacggagatttgtatcatcgcctgataa

SEQ ID NO: 1072 - DNA, 47 bp, Artificial sequence
  artificial DNA molecule for generation of DNA nanostructure
tgcgcgaatccaataagagcataaagagcttacctttaatcataaat

SEQ ID NO: 1073 - DNA, 39 bp, Artificial sequence
  artificial DNA molecule for generation of DNA nanostructure
aaaacgagaatacgtcagcgtggtttttgcggagccgtc

SEQ ID NO: 1074 - DNA, 40 bp, Artificial sequence
  artificial DNA molecule for generation of DNA nanostructure
agctaaaagggacattttttgaatcctaaaacgtggcaca

SEQ ID NO: 1075 - DNA, 45 bp, Artificial sequence
  artificial DNA molecule for generation of DNA nanostructure
gaaccctttacattggcagattccagaaggcattttgcggaacaa

SEQ ID NO: 1076 - DNA, 40 bp, Artificial sequence
  artificial DNA molecule for generation of DNA nanostructure
ccaacggcagcaccccagcccgaggagtccactattaaag

SEQ ID NO: 1077 - DNA, 48 bp, Artificial sequence
  artificial DNA molecule for generation of DNA nanostructure
aaaaaagccgcacaggcggcctttagtgatgacggcaaacgcggtccg

SEQ ID NO: 1078 - DNA, 40 bp, Artificial sequence
  artificial DNA molecule for generation of DNA nanostructure
aggtctttagtaagagatataatgtctggaagtttcattc

SEQ ID NO: 1079 - DNA, 38 bp, Artificial sequence
  artificial DNA molecule for generation of DNA nanostructure
aaatggtcaataaccttgaccaactcagtgaataaggc

SEQ ID NO: 1080 - DNA, 48 bp, Artificial sequence
  artificial DNA molecule for generation of DNA nanostructure
tcgtctgaattttttggattataacaggaaaatttttcgctcatggaa

SEQ ID NO: 1081 - DNA, 48 bp, Artificial sequence
  artificial DNA molecule for generation of DNA nanostructure
agagagtaattgctgacagttcagagtagtaaattgggcttaacaaag

SEQ ID NO: 1082 - DNA, 48 bp, Artificial sequence
  artificial DNA molecule for generation of DNA nanostructure
ctcataactgccgttcagggtaaagttaaacgagtttgaggggacgac

SEQ ID NO: 1083 - DNA, 40 bp, Artificial sequence
  artificial DNA molecule for generation of DNA nanostructure
aacctgtccatcacgcagtaataacatttttcacttgagt

SEQ ID NO: 1084 - DNA, 33 bp, Artificial sequence
  artificial DNA molecule for generation of DNA nanostructure
tgggaacaattggtgtagatgcgttttaattcg

SEQ ID NO: 1085 - DNA, 43 bp, Artificial sequence
  artificial DNA molecule for generation of DNA nanostructure
taaaaaaaacgtggactttttccaacgtcaaatcggcaaaatc

SEQ ID NO: 1086 - DNA, 39 bp, Artificial sequence
  artificial DNA molecule for generation of DNA nanostructure
atcccgtaaagaatttttagcgaggttgtgtacatcgac

SEQ ID NO: 1087 - DNA, 41 bp, Artificial sequence
  artificial DNA molecule for generation of DNA nanostructure
cgttgagtaacattatagcggaattatcatttttcatattc

SEQ ID NO: 1088 - DNA, 48 bp, Artificial sequence
  artificial DNA molecule for generation of DNA nanostructure
atgctgatggaacgtgccggacttgtagagactgctccttaggtcacg

SEQ ID NO: 1089 - DNA, 40 bp, Artificial sequence
  artificial DNA molecule for generation of DNA nanostructure
taaccgtgcatctgccaatgggatttgataagacacgacc

SEQ ID NO: 1090 - DNA, 45 bp, Artificial sequence
  artificial DNA molecule for generation of DNA nanostructure
cagcaggctttttaaaatcctgtttgataagccggcgaacgtggc

SEQ ID NO: 1091 - DNA, 47 bp, Artificial sequence
  artificial DNA molecule for generation of DNA nanostructure
ataattacctttccagagcctaatagggaaggtaaatattgacggaa

SEQ ID NO: 1092 - DNA, 46 bp, Artificial sequence
  artificial DNA molecule for generation of DNA nanostructure
accctgactattatagttttttagaagctacataacgtttttcaaa

SEQ ID NO: 1093 - DNA, 42 bp, Artificial sequence
  artificial DNA molecule for generation of DNA nanostructure
tagtttgaccattatgtcaatttttcatatgtaccccggttg

SEQ ID NO: 1094 - DNA, 48 bp, Artificial sequence
  artificial DNA molecule for generation of DNA nanostructure
accgagcacaaatatttctacaaagagagggtagctatttccctcaga

SEQ ID NO: 1095 - DNA, 40 bp, Artificial sequence
  artificial DNA molecule for generation of DNA nanostructure
ccagacgttagtaaaatcaccagtagtttttaccattacc

SEQ ID NO: 1096 - DNA, 39 bp, Artificial sequence
  artificial DNA molecule for generation of DNA nanostructure
gggcgacaggagccttcagtcacgacgttgtaaaacgac

SEQ ID NO: 1097 - DNA, 44 bp, Artificial sequence
  artificial DNA molecule for generation of DNA nanostructure
taaagactttttcatgggcttgcacaactatttttagtacggtg

SEQ ID NO: 1098 - DNA, 31 bp, Artificial sequence
  artificial DNA molecule for generation of DNA nanostructure
ccacctgtagccagctcccgtcggattctcc

SEQ ID NO: 1099 - DNA, 40 bp, Artificial sequence
  artificial DNA molecule for generation of DNA nanostructure
agaaaggacacgttgaaaatctccaaaaatttattagcaa

SEQ ID NO: 1100 - DNA, 49 bp, Artificial sequence
  artificial DNA molecule for generation of DNA nanostructure
agtaataaatcggttgtaccatttttaaacattatgaaaattaagcaat

SEQ ID NO: 1101 - DNA, 46 bp, Artificial sequence
  artificial DNA molecule for generation of DNA nanostructure
gagtaatgaaacgttgtataagtcggaacgaatcatagaagagtca

SEQ ID NO: 1102 - DNA, 34 bp, Artificial sequence
  artificial DNA molecule for generation of DNA nanostructure
caaaataagacttttttggatagcgtcgcaccgc

SEQ ID NO: 1103 - DNA, 49 bp, Artificial sequence
  artificial DNA molecule for generation of DNA nanostructure
gaaaccgaattgagggtcatatggtttagcgtccttattaaaataaatc

SEQ ID NO: 1104 - DNA, 37 bp, Artificial sequence
  artificial DNA molecule for generation of DNA nanostructure
gcttcaaagcgaagctgcgcaactgtcatgccattcg

SEQ ID NO: 1105 - DNA, 46 bp, Artificial sequence
  artificial DNA molecule for generation of DNA nanostructure
aaacgaacaatgcagagtaatcttgacaagatttttccggatattc

SEQ ID NO: 1106 - DNA, 39 bp, Artificial sequence
  artificial DNA molecule for generation of DNA nanostructure
ggccggaaagtttgcctttaccagtaaataagtatacaa

SEQ ID NO: 1107 - DNA, 40 bp, Artificial sequence
  artificial DNA molecule for generation of DNA nanostructure
atagtgaaacgaaggcaccaacctaatacgtaatgccact

SEQ ID NO: 1108 - DNA, 45 bp, Artificial sequence
  artificial DNA molecule for generation of DNA nanostructure
tgcgggaggcatcaaaaataattgctcgaggtgaatttcttaaac

SEQ ID NO: 1109 - DNA, 48 bp, Artificial sequence
  artificial DNA molecule for generation of DNA nanostructure
caaaataaacagccataagattagttgctaaaacatgttcagctaatg

SEQ ID NO: 1110 - DNA, 48 bp, Artificial sequence
  artificial DNA molecule for generation of DNA nanostructure
accagaagggccagtggacttgagccaaaaggctccaaaattcaaccg

SEQ ID NO: 1111 - DNA, 46 bp, Artificial sequence
  artificial DNA molecule for generation of DNA nanostructure
gggcgatcggtgcgggcccacgcgctcattttcgcattaaattagc

SEQ ID NO: 1112 - DNA, 49 bp, Artificial sequence
  artificial DNA molecule for generation of DNA nanostructure
agcttgaaaaatgaaacaattttttacaactaaaggaattgtgtgagcg

SEQ ID NO: 1113 - DNA, 37 bp, Artificial sequence
  artificial DNA molecule for generation of DNA nanostructure
aatactttagtaacaattcatcaacattaaaatcagc

SEQ ID NO: 1114 - DNA, 40 bp, Artificial sequence
  artificial DNA molecule for generation of DNA nanostructure
cgcgtctggccttgaccggaagcattaaatcaataaccga

SEQ ID NO: 1115 - DNA, 48 bp, Artificial sequence
  artificial DNA molecule for generation of DNA nanostructure
aagcctcaatcatacaggctttttaggcaaagaatttttgataatcag

SEQ ID NO: 1116 - DNA, 40 bp, Artificial sequence
  artificial DNA molecule for generation of DNA nanostructure
aagcctgtttagtatcgaaaatttgccagttaacaaagtt

SEQ ID NO: 1117 - DNA, 46 bp, Artificial sequence
  artificial DNA molecule for generation of DNA nanostructure
gaaagcgcagtctctcacaaacgcgtttgcagccaccaacctaaat

SEQ ID NO: 1118 - DNA, 44 bp, Artificial sequence
  artificial DNA molecule for generation of DNA nanostructure
acgacgacttaatttcccggaatccatagccccagactgtagcg

SEQ ID NO: 1119 - DNA, 39 bp, Artificial sequence
  artificial DNA molecule for generation of DNA nanostructure
ttcaaccgttctagctgataaatgagacagtggaagatt

SEQ ID NO: 1120 - DNA, 46 bp, Artificial sequence
  artificial DNA molecule for generation of DNA nanostructure
ctgtagttttttcaacatgtttaactccaatttttaggtcaggatt

SEQ ID NO: 1121 - DNA, 45 bp, Artificial sequence
  artificial DNA molecule for generation of DNA nanostructure
catcaatatgggtggcattttttaattctactaatagatattttc

SEQ ID NO: 1122 - DNA, 40 bp, Artificial sequence
  artificial DNA molecule for generation of DNA nanostructure
cataatcaagtagcgaccgaacgcaaggataaaaattttt

SEQ ID NO: 1123 - DNA, 48 bp, Artificial sequence
  artificial DNA molecule for generation of DNA nanostructure
tgtaggtaaagatggccttgatattgaatttacagaatcaacgtcacc

SEQ ID NO: 1124 - DNA, 40 bp, Artificial sequence
  artificial DNA molecule for generation of DNA nanostructure
aatattttccctcagcaatgacaacaaccatcgcctcttc

SEQ ID NO: 1125 - DNA, 49 bp, Artificial sequence
  artificial DNA molecule for generation of DNA nanostructure
taaatatggggagttatatattcggtcgctgaaaagcggattgtgggaa

SEQ ID NO: 1126 - DNA, 38 bp, Artificial sequence
  artificial DNA molecule for generation of DNA nanostructure
cgagctgaaaaatacaaacaagagaatcgatccattaa

SEQ ID NO: 1127 - DNA, 48 bp, Artificial sequence
  artificial DNA molecule for generation of DNA nanostructure
tgaggcaggccaccacaccctcagaaccgccatttttaacttaatggt

SEQ ID NO: 1128 - DNA, 40 bp, Artificial sequence
  artificial DNA molecule for generation of DNA nanostructure
gtcagacgggaaccagcatctttttaaggcgtcgccaaag

SEQ ID NO: 1129 - DNA, 40 bp, Artificial sequence
  artificial DNA molecule for generation of DNA nanostructure
aaatcaccatttcaaaagggtgagaaaggccgtaatgccg

SEQ ID NO: 1130 - DNA, 40 bp, Artificial sequence
  artificial DNA molecule for generation of DNA nanostructure
cgaataatcatcgataaagcctttatttcttccagtaagc

SEQ ID NO: 1131 - DNA, 49 bp, Artificial sequence
  artificial DNA molecule for generation of DNA nanostructure
tctggtgccggaaaccataatagtaaaatgtttgcgagaggcttttgca

SEQ ID NO: 1132 - DNA, 40 bp, Artificial sequence
  artificial DNA molecule for generation of DNA nanostructure
ccattcaggggggatgtgctgcaaacgccagctggcgaaa

SEQ ID NO: 1133 - DNA, 46 bp, Artificial sequence
  artificial DNA molecule for generation of DNA nanostructure
ataggaacgccagcagcgccgacagcgaaagacaccgtgtgataaa

SEQ ID NO: 1134 - DNA, 38 bp, Artificial sequence
  artificial DNA molecule for generation of DNA nanostructure
gatcgtcagttaaaattttaaccacatatataccctgt

SEQ ID NO: 1135 - DNA, 49 bp, Artificial sequence
  artificial DNA molecule for generation of DNA nanostructure
ccacatttttttcaacttaacggaaaccagtcaggacgttgactaaaac

SEQ ID NO: 1136 - DNA, 48 bp, Artificial sequence
  artificial DNA molecule for generation of DNA nanostructure
gcctgagacaaaaacacaaatcactttaaatgcaatgcctagaaccct

SEQ ID NO: 1137 - DNA, 34 bp, Artificial sequence
  artificial DNA molecule for generation of DNA nanostructure
atcttctgccggaaccgcctcgaaccgccaccct

SEQ ID NO: 1138 - DNA, 48 bp, Artificial sequence
  artificial DNA molecule for generation of DNA nanostructure
aaaactttttcaaatataaatgcttattaattaattttcccttagaat

SEQ ID NO: 1139 - DNA, 47 bp, Artificial sequence
  artificial DNA molecule for generation of DNA nanostructure
taccaagcgcgattttaagtttttactggctcattatcaacattatt

SEQ ID NO: 1140 - DNA, 39 bp, Artificial sequence
  artificial DNA molecule for generation of DNA nanostructure
ggctatcaggtcatttttatcaaagggtagcaacggcta

SEQ ID NO: 1141 - DNA, 47 bp, Artificial sequence
  artificial DNA molecule for generation of DNA nanostructure
ctccggctaacatagcgatagcttagattaagttaattgattgaaat

SEQ ID NO: 1142 - DNA, 44 bp, Artificial sequence
  artificial DNA molecule for generation of DNA nanostructure
taggctttttggctgaccttactcatctttgacccccagcgatt

SEQ ID NO: 1143 - DNA, 39 bp, Artificial sequence
  artificial DNA molecule for generation of DNA nanostructure
gttatatatcacctcagagccgcccctcagagccgccac

SEQ ID NO: 1144 - DNA, 40 bp, Artificial sequence
  artificial DNA molecule for generation of DNA nanostructure
catcaagaaggaagtttgaacggtaatcttttttaaaact

SEQ ID NO: 1145 - DNA, 40 bp, Artificial sequence
  artificial DNA molecule for generation of DNA nanostructure
aaggccgcttttgcggcagaggctaaaagcccgtctggag

SEQ ID NO: 1146 - DNA, 40 bp, Artificial sequence
  artificial DNA molecule for generation of DNA nanostructure
gtaattgagcgctaattgaacaaatgaaccataaacttaa

SEQ ID NO: 1147 - DNA, 43 bp, Artificial sequence
  artificial DNA molecule for generation of DNA nanostructure
attgctttagcatatagaaggctttattaaacacaagaattga

SEQ ID NO: 1148 - DNA, 40 bp, Artificial sequence
  artificial DNA molecule for generation of DNA nanostructure
ttttcacgtcgtaatctgcgctcaaaagcctgagcaagcc

SEQ ID NO: 1149 - DNA, 40 bp, Artificial sequence
  artificial DNA molecule for generation of DNA nanostructure
gtttttattttcatcgcgagaacagggtgcctcacccaaa

SEQ ID NO: 1150 - DNA, 40 bp, Artificial sequence
  artificial DNA molecule for generation of DNA nanostructure
tttccttatcattccatcaataataatttacgtttcattt

SEQ ID NO: 1151 - DNA, 47 bp, Artificial sequence
  artificial DNA molecule for generation of DNA nanostructure
ccagaatcaaattgttcctaaaggtcaagtttcactacggtcagagg

SEQ ID NO: 1152 - DNA, 43 bp, Artificial sequence
  artificial DNA molecule for generation of DNA nanostructure
gttaagccgagaattaactgaacacccatcagagaataaaaac

SEQ ID NO: 1153 - DNA, 48 bp, Artificial sequence
  artificial DNA molecule for generation of DNA nanostructure
aattttatcctccttttacatcggacgcgaggcccatcctcggctgtc

SEQ ID NO: 1154 - DNA, 46 bp, Artificial sequence
  artificial DNA molecule for generation of DNA nanostructure
agaaaggaatcgctggcagccttggaacaaatagggttgagtgttg

SEQ ID NO: 1155 - DNA, 36 bp, Artificial sequence
  artificial DNA molecule for generation of DNA nanostructure
caaatgctttaaacaacactatcataaccgaggcat

SEQ ID NO: 1156 - DNA, 47 bp, Artificial sequence
  artificial DNA molecule for generation of DNA nanostructure
ggtttttcatcccacgtcgcactctctaaaataaccctcaattaaca

SEQ ID NO: 1157 - DNA, 50 bp, Artificial sequence
  artificial DNA molecule for generation of DNA nanostructure
ccacgctggtttgcgtcggtggtgccttttcacctattgggcgccagggt

SEQ ID NO: 1158 - DNA, 39 bp, Artificial sequence
  artificial DNA molecule for generation of DNA nanostructure
gtacagacattacccaatcattgttgagatttttaattt

SEQ ID NO: 1159 - DNA, 32 bp, Artificial sequence
  artificial DNA molecule for generation of DNA nanostructure
ttccagttccggccagcaagaatgattcgaca

SEQ ID NO: 1160 - DNA, 37 bp, Artificial sequence
  artificial DNA molecule for generation of DNA nanostructure
gacttcaaatatcgggcaaaaatcattgaatccccct

SEQ ID NO: 1161 - DNA, 40 bp, Artificial sequence
  artificial DNA molecule for generation of DNA nanostructure
caactttaaatcaacgtgagatggtaggaataaggaatta

SEQ ID NO: 1162 - DNA, 51 bp, Artificial sequence
  artificial DNA molecule for generation of DNA nanostructure
ttgaggacacgggtaaaaaacgaaagaggcaaaagaatacggaagaaaaat

SEQ ID NO: 1163 - DNA, 45 bp, Artificial sequence
  artificial DNA molecule for generation of DNA nanostructure
ttgctttattggcgattaagttgggtaacgccagataaaagaaac

SEQ ID NO: 1164 - DNA, 41 bp, Artificial sequence
  artificial DNA molecule for generation of DNA nanostructure
gccagagggggggcaaagccaaaaagattatttttgaggaa

SEQ ID NO: 1165 - DNA, 42 bp, Artificial sequence
  artificial DNA molecule for generation of DNA nanostructure
aacagtagggcacgctgaggtctgagagactaccttgagaga

SEQ ID NO: 1166 - DNA, 50 bp, Artificial sequence
  artificial DNA molecule for generation of DNA nanostructure
gcaaagacaccacggaataacaataccgatagttccgtaatctaaattgt

SEQ ID NO: 1167 - DNA, 22 bp, Artificial sequence
  artificial DNA molecule for generation of DNA nanostructure
ctacgttaataaaagaagtttt

SEQ ID NO: 1168 - DNA, 32 bp, Artificial sequence
  artificial DNA molecule for generation of DNA nanostructure
taacaacgccaaccagtataaagccaacgctc

SEQ ID NO: 1169 - DNA, 36 bp, Artificial sequence
  artificial DNA molecule for generation of DNA nanostructure
cagtaataagagactgtccagccttgaataggttgg

SEQ ID NO: 1170 - DNA, 44 bp, Artificial sequence
  artificial DNA molecule for generation of DNA nanostructure
ttacgcagtatgtggcaacatggttttcctaattgtatcggttt

SEQ ID NO: 1171 - DNA, 44 bp, Artificial sequence
  artificial DNA molecule for generation of DNA nanostructure
agtttatttaaaggttagcaaacgtagaaaaggaaacgcaataa

SEQ ID NO: 1172 - DNA, 36 bp, Artificial sequence
  artificial DNA molecule for generation of DNA nanostructure
agtaattatataaagtaccgacagaatcgccatatt

SEQ ID NO: 1173 - DNA, 45 bp, Artificial sequence
  artificial DNA molecule for generation of DNA nanostructure
aaaggtaaattcttacatgtaatttggcatgattaagactcctta

SEQ ID NO: 1174 - DNA, 37 bp, Artificial sequence
  artificial DNA molecule for generation of DNA nanostructure
taacggaatacccaatcaataatatgcgtaataaaca

SEQ ID NO: 1175 - DNA, 44 bp, Artificial sequence
  artificial DNA molecule for generation of DNA nanostructure
tacatacattgtcacaaaagaactaggcagaggcattttcgagc

SEQ ID NO: 1176 - DNA, 41 bp, Artificial sequence
  artificial DNA molecule for generation of DNA nanostructure
caaaaacctgtcgtgcttttctttttcaccgcattgggcgc

SEQ ID NO: 1177 - DNA, 48 bp, Artificial sequence
  artificial DNA molecule for generation of DNA nanostructure
atggtcgctcactgcccgaacgtggggaacaaagcaaactagtatgtt

SEQ ID NO: 1178 - DNA, 48 bp, Artificial sequence
  artificial DNA molecule for generation of DNA nanostructure
tgtactattatagtcgtaccaggtattaaagctttccagtcgggacta

SEQ ID NO: 1179 - DNA, 32 bp, Artificial sequence
  artificial DNA molecule for generation of DNA nanostructure
cggcattttttagatgccgggtacatccctta

SEQ ID NO: 1180 - DNA, 47 bp, Artificial sequence
  artificial DNA molecule for generation of DNA nanostructure
tagggttgaaatcctgtgccagccgcgcggggagaggcgttaatgaa

SEQ ID NO: 1181 - DNA, 45 bp, Artificial sequence
  artificial DNA molecule for generation of DNA nanostructure
tttgatgaaatattgagtcaccgttagcaaggccggaagaggaaa

SEQ ID NO: 1182 - DNA, 38 bp, Artificial sequence
  artificial DNA molecule for generation of DNA nanostructure
gaattcgacgcgtgcctttttgttcttcgcgtccgtga

SEQ ID NO: 1183 - DNA, 49 bp, Artificial sequence
  artificial DNA molecule for generation of DNA nanostructure
gcctattgacgttttaaccctcattataccgttccagtaagttatcacc

SEQ ID NO: 1184 - DNA, 48 bp, Artificial sequence
  artificial DNA molecule for generation of DNA nanostructure
tagccggacgcctgatcggggtttggtgcctaatgagtaaatgaattt

SEQ ID NO: 1185 - DNA, 39 bp, Artificial sequence
  artificial DNA molecule for generation of DNA nanostructure
attaattgcgttgcatgggcgatggccctcaagaagcaa

SEQ ID NO: 1186 - DNA, 47 bp, Artificial sequence
  artificial DNA molecule for generation of DNA nanostructure
cggagatttgtatcatcactaaataagcctggtgcactacgtgaacc

SEQ ID NO: 1187 - DNA, 47 bp, Artificial sequence
  artificial DNA molecule for generation of DNA nanostructure
caacgccccagacgttgccgtcggaaggattggtaataactgctcca

SEQ ID NO: 1188 - DNA, 48 bp, Artificial sequence
  artificial DNA molecule for generation of DNA nanostructure
cgagaaacaccagaacgagtagtaaattgggcccaaataagaaacgat

SEQ ID NO: 1189 - DNA, 40 bp, Artificial sequence
  artificial DNA molecule for generation of DNA nanostructure
ctggccctgagagagtgattgccctcaccagtgagacggg

SEQ ID NO: 1190 - DNA, 45 bp, Artificial sequence
  artificial DNA molecule for generation of DNA nanostructure
agcttaattgctgaatgcaggcgaagtgttgttcggccaataatc

SEQ ID NO: 1191 - DNA, 40 bp, Artificial sequence
  artificial DNA molecule for generation of DNA nanostructure
agggggtaatagtaaatgagagatgaaaacgaaagattaa

SEQ ID NO: 1192 - DNA, 43 bp, Artificial sequence
  artificial DNA molecule for generation of DNA nanostructure
aaagaagtacgcatttttccagcttacggacgacgataaaaac

SEQ ID NO: 1193 - DNA, 47 bp, Artificial sequence
  artificial DNA molecule for generation of DNA nanostructure
acccgattgagggagccgccacccggataagtagtgagctaactcac

SEQ ID NO: 1194 - DNA, 32 bp, Artificial sequence
  artificial DNA molecule for generation of DNA nanostructure
cggaaatttttaccaggccgcgggatcgtcac

SEQ ID NO: 1195 - DNA, 41 bp, Artificial sequence
  artificial DNA molecule for generation of DNA nanostructure
caaaatagcgatttttaggcttttgcaagctctcacggaaa

SEQ ID NO: 1196 - DNA, 49 bp, Artificial sequence
  artificial DNA molecule for generation of DNA nanostructure
ctaaaggtttttagccccacatacgagtttttcggaagcataaagtgta

SEQ ID NO: 1197 - DNA, 44 bp, Artificial sequence
  artificial DNA molecule for generation of DNA nanostructure
ctttccggcatttttcgcttagcaatatttttagcctcagagca

SEQ ID NO: 1198 - DNA, 50 bp, Artificial sequence
  artificial DNA molecule for generation of DNA nanostructure
gaatgccaacggcagcaccgtctttttgtggtgccattttaaacagttca

SEQ ID NO: 1199 - DNA, 40 bp, Artificial sequence
  artificial DNA molecule for generation of DNA nanostructure
gcatcaaagaatgaccatcacccaaatcattgcaggcgct

SEQ ID NO: 1200 - DNA, 39 bp, Artificial sequence
  artificial DNA molecule for generation of DNA nanostructure
gttgtaaagtctttaccctgactaggattagaaattgtg

SEQ ID NO: 1201 - DNA, 47 bp, Artificial sequence
  artificial DNA molecule for generation of DNA nanostructure
gaatttgatgtttagtaaatattcattgaattcaagttttttggggt

SEQ ID NO: 1202 - DNA, 48 bp, Artificial sequence
  artificial DNA molecule for generation of DNA nanostructure
agactttcctgcaaggcgattaagcgttggtgcgcgttttagagagta

SEQ ID NO: 1203 - DNA, 40 bp, Artificial sequence
  artificial DNA molecule for generation of DNA nanostructure
cgccaaagtaaaggtgcgcaataataacggaatacccaaa

SEQ ID NO: 1204 - DNA, 48 bp, Artificial sequence
  artificial DNA molecule for generation of DNA nanostructure
tcgcactgcatctttttagcggggccccctcaaatgcccctttgccag

SEQ ID NO: 1205 - DNA, 42 bp, Artificial sequence
  artificial DNA molecule for generation of DNA nanostructure
gtacggtgtctggaagtttcatttttttcatataacagttga

SEQ ID NO: 1206 - DNA, 40 bp, Artificial sequence
  artificial DNA molecule for generation of DNA nanostructure
cagggtggtcagctgcagtttgcgtcgctggtttgcccca

SEQ ID NO: 1207 - DNA, 39 bp, Artificial sequence
  artificial DNA molecule for generation of DNA nanostructure
caatcataagggaaccgaactgaaaataaatggggtcag

SEQ ID NO: 1208 - DNA, 40 bp, Artificial sequence
  artificial DNA molecule for generation of DNA nanostructure
ccgtgggatgttaaataaaaataaataggtcattgggtaa

SEQ ID NO: 1209 - DNA, 44 bp, Artificial sequence
  artificial DNA molecule for generation of DNA nanostructure
gtaccaaactgcgcgcctgtgcttataaatctttttaaagaata

SEQ ID NO: 1210 - DNA, 40 bp, Artificial sequence
  artificial DNA molecule for generation of DNA nanostructure
ttttcccagcgaaacgtggccttcctgtagcccaacccgt

SEQ ID NO: 1211 - DNA, 55 bp, Artificial sequence
  artificial DNA molecule for generation of DNA nanostructure
cgacgacaggcctctttttttgctattacgccagctgatctgccagtttgagggg

SEQ ID NO: 1212 - DNA, 41 bp, Artificial sequence
  artificial DNA molecule for generation of DNA nanostructure
gcaaaattaaggtcatttttgcggatgctccttttaatatt

SEQ ID NO: 1213 - DNA, 48 bp, Artificial sequence
  artificial DNA molecule for generation of DNA nanostructure
tggcttagacatgttttaaatatgcaactaaatgtaaacgttgataag

SEQ ID NO: 1214 - DNA, 40 bp, Artificial sequence
  artificial DNA molecule for generation of DNA nanostructure
ataaatcaaatcgtcaactggatagcgtccaaacgaggcg

SEQ ID NO: 1215 - DNA, 40 bp, Artificial sequence
  artificial DNA molecule for generation of DNA nanostructure
tattacgcccaacaggacaaacggcggatgcacggattct

SEQ ID NO: 1216 - DNA, 43 bp, Artificial sequence
  artificial DNA molecule for generation of DNA nanostructure
cagaaaccgtctatcaagctgtttcctgtttttgtgaaattgt

SEQ ID NO: 1217 - DNA, 46 bp, Artificial sequence
  artificial DNA molecule for generation of DNA nanostructure
cggaacccgaggtgccgtaaagtactgcggaaaatcagacgacggc

SEQ ID NO: 1218 - DNA, 51 bp, Artificial sequence
  artificial DNA molecule for generation of DNA nanostructure
actggtgtgttgaggaagcccgaaaacgggatgtgtccgtggtgaagggat

SEQ ID NO: 1219 - DNA, 48 bp, Artificial sequence
  artificial DNA molecule for generation of DNA nanostructure
catcttttaaggtgaacgtccctcagaaccgccttgatattcacaaac

SEQ ID NO: 1220 - DNA, 46 bp, Artificial sequence
  artificial DNA molecule for generation of DNA nanostructure
cgcatcgtaaccgtgcgcgaaaggcaggcaaagtttttgccattcg

SEQ ID NO: 1221 - DNA, 38 bp, Artificial sequence
  artificial DNA molecule for generation of DNA nanostructure
aaaacaggaagattttttgtataagcaaatatttaaat

SEQ ID NO: 1222 - DNA, 44 bp, Artificial sequence
  artificial DNA molecule for generation of DNA nanostructure
tccaataatcccactctgtggtgctcataccgggtttttgtttc

SEQ ID NO: 1223 - DNA, 48 bp, Artificial sequence
  artificial DNA molecule for generation of DNA nanostructure
tttgatggtggttccgaattttttcggcaaaaatcatacataaagcta

SEQ ID NO: 1224 - DNA, 40 bp, Artificial sequence
  artificial DNA molecule for generation of DNA nanostructure
gtcaaagggcgaacaaatcgttaagcccgagacctttaat

SEQ ID NO: 1225 - DNA, 40 bp, Artificial sequence
  artificial DNA molecule for generation of DNA nanostructure
caacagcttcattttccaccagtacgccacccgtttagta

SEQ ID NO: 1226 - DNA, 32 bp, Artificial sequence
  artificial DNA molecule for generation of DNA nanostructure
acgtcacctcatatggattcattacataatca

SEQ ID NO: 1227 - DNA, 49 bp, Artificial sequence
  artificial DNA molecule for generation of DNA nanostructure
tccagtttactccaaccttcaaagagcggattcgccagggcaggtcccg

SEQ ID NO: 1228 - DNA, 47 bp, Artificial sequence
  artificial DNA molecule for generation of DNA nanostructure
aaatcaccagaactggagcaaacgtagaaaatgcagcaactcagaac

SEQ ID NO: 1229 - DNA, 39 bp, Artificial sequence
  artificial DNA molecule for generation of DNA nanostructure
agtagcacgcgacattcaacggagagtccacgcggtcca

SEQ ID NO: 1230 - DNA, 48 bp, Artificial sequence
  artificial DNA molecule for generation of DNA nanostructure
catgattaagactcctataatgcttaaatttttcaggattaattcgag

SEQ ID NO: 1231 - DNA, 29 bp, Artificial sequence
  artificial DNA molecule for generation of DNA nanostructure
aatgctgatgcaaattgtatcggtttatc

SEQ ID NO: 1232 - DNA, 43 bp, Artificial sequence
  artificial DNA molecule for generation of DNA nanostructure
agtaagcatttttatagccgaacaaagttaccagaaggaaacc

SEQ ID NO: 1233 - DNA, 40 bp, Artificial sequence
  artificial DNA molecule for generation of DNA nanostructure
aatagcaaaataataagagcaagaaccgatatgaacgagg

SEQ ID NO: 1234 - DNA, 47 bp, Artificial sequence
  artificial DNA molecule for generation of DNA nanostructure
aaacgctcatggaaatgattatttacattggcgacaatgaagacgct

SEQ ID NO: 1235 - DNA, 40 bp, Artificial sequence
  artificial DNA molecule for generation of DNA nanostructure
atatccagaacaatattaccgccaacgaccagtaataaaa

SEQ ID NO: 1236 - DNA, 52 bp, Artificial sequence
  artificial DNA molecule for generation of DNA nanostructure
acatggctgatataagtattttttgcccatacgtaaaagccaccggaaccgc

SEQ ID NO: 1237 - DNA, 40 bp, Artificial sequence
  artificial DNA molecule for generation of DNA nanostructure
gcgacagatgtcacaatctttttatagaaaataatgaaac

SEQ ID NO: 1238 - DNA, 47 bp, Artificial sequence
  artificial DNA molecule for generation of DNA nanostructure
tagcgtttgccatcgatagcagctttttccgtaatcagtataagaaa

SEQ ID NO: 1239 - DNA, 38 bp, Artificial sequence
  artificial DNA molecule for generation of DNA nanostructure
ggagcactcggtcagtattaacatcggccttgctggta

SEQ ID NO: 1240 - DNA, 44 bp, Artificial sequence
  artificial DNA molecule for generation of DNA nanostructure
cctcagagctcccttttttagagccgccacattgccttgagtaa

SEQ ID NO: 1241 - DNA, 40 bp, Artificial sequence
  artificial DNA molecule for generation of DNA nanostructure
ccgccacccaggaggttgaggcagggtgtacagaccaggc

SEQ ID NO: 1242 - DNA, 47 bp, Artificial sequence
  artificial DNA molecule for generation of DNA nanostructure
gcctttacaccctgaacaaatagccctaaaacttagattatcaatat

SEQ ID NO: 1243 - DNA, 48 bp, Artificial sequence
  artificial DNA molecule for generation of DNA nanostructure
gcgaaagataacccacaagaatttatcaagtttcggcattttcggtca

SEQ ID NO: 1244 - DNA, 35 bp, Artificial sequence
  artificial DNA molecule for generation of DNA nanostructure
ccaaaaggagcctttaattgcgaataaacagcttg

SEQ ID NO: 1245 - DNA, 40 bp, Artificial sequence
  artificial DNA molecule for generation of DNA nanostructure
aacgttattaccatatcaaaattataatcattttacaaaa

SEQ ID NO: 1246 - DNA, 47 bp, Artificial sequence
  artificial DNA molecule for generation of DNA nanostructure
ggctacacagagggtctgaaatgacctacattttgacgcaacaatga

SEQ ID NO: 1247 - DNA, 32 bp, Artificial sequence
  artificial DNA molecule for generation of DNA nanostructure
agcttgctttcgaggtgaatttctaaaaggct

SEQ ID NO: 1248 - DNA, 40 bp, Artificial sequence
  artificial DNA molecule for generation of DNA nanostructure
gattggccaccctcatttttagccaccactagccccctta

SEQ ID NO: 1249 - DNA, 40 bp, Artificial sequence
  artificial DNA molecule for generation of DNA nanostructure
tcaatagttggctattccagtcacgccattgcaacaggaa

SEQ ID NO: 1250 - DNA, 47 bp, Artificial sequence
  artificial DNA molecule for generation of DNA nanostructure
taaagttttttttttcgtcttttgtagcattctttttacagacagcc

SEQ ID NO: 1251 - DNA, 47 bp, Artificial sequence
  artificial DNA molecule for generation of DNA nanostructure
gaacccaaaaatctccaaaataataatttttgtagcaactttcatga

SEQ ID NO: 1252 - DNA, 52 bp, Artificial sequence
  artificial DNA molecule for generation of DNA nanostructure
caataggctgaggcttgcagggagttttttaaaggccgcttttacccaagcc

SEQ ID NO: 1253 - DNA, 37 bp, Artificial sequence
  artificial DNA molecule for generation of DNA nanostructure
ccaactttgaaagaggacagttttttgaacgtcagac

SEQ ID NO: 1254 - DNA, 37 bp, Artificial sequence
  artificial DNA molecule for generation of DNA nanostructure
tatatgtagagaagagagcgatagcatcgccaaggtt

SEQ ID NO: 1255 - DNA, 42 bp, Artificial sequence
  artificial DNA molecule for generation of DNA nanostructure
cagttacatttcatttcagtggtttgaaataccgaccgtgtg

SEQ ID NO: 1256 - DNA, 39 bp, Artificial sequence
  artificial DNA molecule for generation of DNA nanostructure
tcacgttgctcatagttagaggaacaactaaaaagactt

SEQ ID NO: 1257 - DNA, 43 bp, Artificial sequence
  artificial DNA molecule for generation of DNA nanostructure
tgtaccgtaactttttctgagtttcgtagggatagctcagagc

SEQ ID NO: 1258 - DNA, 49 bp, Artificial sequence
  artificial DNA molecule for generation of DNA nanostructure
gcataggcataaggcttgccctgagctgctcattcagtgacatgcaaaa

SEQ ID NO: 1259 - DNA, 40 bp, Artificial sequence
  artificial DNA molecule for generation of DNA nanostructure
gcaacatataaaagaaacgcaaagacatttttcacggaat

SEQ ID NO: 1260 - DNA, 39 bp, Artificial sequence
  artificial DNA molecule for generation of DNA nanostructure
catcgcccacgcatatcaatcgtaattgagcgctaatat

SEQ ID NO: 1261 - DNA, 39 bp, Artificial sequence
  artificial DNA molecule for generation of DNA nanostructure
cagcgattctaaaacactcatctttttcaacgtaacaaa

SEQ ID NO: 1262 - DNA, 48 bp, Artificial sequence
  artificial DNA molecule for generation of DNA nanostructure
tttaacaaaaataaacccagagcctaatttgcttgaccccaacagttt

SEQ ID NO: 1263 - DNA, 47 bp, Artificial sequence
  artificial DNA molecule for generation of DNA nanostructure
gacaaagaacatcttctatgtgagttaattacaatgaatatcccaat

SEQ ID NO: 1264 - DNA, 46 bp, Artificial sequence
  artificial DNA molecule for generation of DNA nanostructure
ttgagatggtttaatttcaactttttgcaccagtacctactcgtat

SEQ ID NO: 1265 - DNA, 40 bp, Artificial sequence
  artificial DNA molecule for generation of DNA nanostructure
tggctgaccttcacgtatatttttacagttaatgccccct

SEQ ID NO: 1266 - DNA, 48 bp, Artificial sequence
  artificial DNA molecule for generation of DNA nanostructure
cctcagcaggaatatttttgtgtatcaccgtactcaggagtcagaacc

SEQ ID NO: 1267 - DNA, 47 bp, Artificial sequence
  artificial DNA molecule for generation of DNA nanostructure
gacctaaatttaacggagtgagaatagaacgtccattaatggaaaca

SEQ ID NO: 1268 - DNA, 48 bp, Artificial sequence
  artificial DNA molecule for generation of DNA nanostructure
aagaggaaagtattaagatttttgctgagactcctcaagaagagggtt

SEQ ID NO: 1269 - DNA, 48 bp, Artificial sequence
  artificial DNA molecule for generation of DNA nanostructure
atcaagaaaacaaaatgaataaccagattttcttaaaaataccgaacg

SEQ ID NO: 1270 - DNA, 44 bp, Artificial sequence
  artificial DNA molecule for generation of DNA nanostructure
aagtttattgagttaagccctagctatcttaccgaagccctttt

SEQ ID NO: 1271 - DNA, 46 bp, Artificial sequence
  artificial DNA molecule for generation of DNA nanostructure
ggagaattggaagtttcgaaggcaaacgatctgctaaacaactttc

SEQ ID NO: 1272 - DNA, 48 bp, Artificial sequence
  artificial DNA molecule for generation of DNA nanostructure
agaacggtttatcaaaatcataggtccagattcaagtctttaatgcgc

SEQ ID NO: 1273 - DNA, 40 bp, Artificial sequence
  artificial DNA molecule for generation of DNA nanostructure
aactgaacagagagaataacataaaccggatataaaacga

SEQ ID NO: 1274 - DNA, 47 bp, Artificial sequence
  artificial DNA molecule for generation of DNA nanostructure
gaattaccttttaccttcattacccaaattgtttaacgtcaaaacag

SEQ ID NO: 1275 - DNA, 44 bp, Artificial sequence
  artificial DNA molecule for generation of DNA nanostructure
aagtacaatcgaaatccgctcggaacctatttttttttctgaaa

SEQ ID NO: 1276 - DNA, 49 bp, Artificial sequence
  artificial DNA molecule for generation of DNA nanostructure
taacgtatgaaaatagcagtacataagaggactaggaatccaatcgcaa

SEQ ID NO: 1277 - DNA, 49 bp, Artificial sequence
  artificial DNA molecule for generation of DNA nanostructure
gaactgagtgaggctttacaacaacataccgatagttgcgctgagagac

SEQ ID NO: 1278 - DNA, 47 bp, Artificial sequence
  artificial DNA molecule for generation of DNA nanostructure
gaatacaataccaagcgctttttaaacatctgtattttttgggattt

SEQ ID NO: 1279 - DNA, 44 bp, Artificial sequence
  artificial DNA molecule for generation of DNA nanostructure
taattttaaaagtttgattttttaacattatcattttgcggaac

SEQ ID NO: 1280 - DNA, 47 bp, Artificial sequence
  artificial DNA molecule for generation of DNA nanostructure
ccaaggtgaattaccttatgcgattttttttaagaactggctcatta

SEQ ID NO: 1281 - DNA, 44 bp, Artificial sequence
  artificial DNA molecule for generation of DNA nanostructure
tttttgaagaagtattaaaccaagtttttaccgcactcatcgag

SEQ ID NO: 1282 - DNA, 44 bp, Artificial sequence
  artificial DNA molecule for generation of DNA nanostructure
tacctttttaacttttttccggcttcagaatcaataatcggctg

SEQ ID NO: 1283 - DNA, 48 bp, Artificial sequence
  artificial DNA molecule for generation of DNA nanostructure
atcaaacttaaatttcgtttaccagctggaggtgtaaggagcgggcgc

SEQ ID NO: 1284 - DNA, 47 bp, Artificial sequence
  artificial DNA molecule for generation of DNA nanostructure
cagtataaatatgcgtccgacttgcgggccccgcttaatgggagcta

SEQ ID NO: 1285 - DNA, 40 bp, Artificial sequence
  artificial DNA molecule for generation of DNA nanostructure
agccatattataattattcatttttttcaattacctgagc

SEQ ID NO: 1286 - DNA, 36 bp, Artificial sequence
  artificial DNA molecule for generation of DNA nanostructure
ataaagtaccgacaaaaggtcgccatattttatcaa

SEQ ID NO: 1287 - DNA, 49 bp, Artificial sequence
  artificial DNA molecule for generation of DNA nanostructure
aagcgaccacaatccgccgggcgcgtctttgctttgtagaagcaaggat

SEQ ID NO: 1288 - DNA, 48 bp, Artificial sequence
  artificial DNA molecule for generation of DNA nanostructure
ccgggtacgccagcggcagtgtcaaacattatagtagtagagatacat

SEQ ID NO: 1289 - DNA, 38 bp, Artificial sequence
  artificial DNA molecule for generation of DNA nanostructure
agccaacgagcaaataatcattaggccgatgagctgaa

SEQ ID NO: 1290 - DNA, 48 bp, Artificial sequence
  artificial DNA molecule for generation of DNA nanostructure
ctcaacagtaggggttgaggatcctatccgcttaaaggttgttgcggt

SEQ ID NO: 1291 - DNA, 33 bp, Artificial sequence
  artificial DNA molecule for generation of DNA nanostructure
ttgcttctgtatttttatcgtcgctaaaacaaa

SEQ ID NO: 1292 - DNA, 47 bp, Artificial sequence
  artificial DNA molecule for generation of DNA nanostructure
tgagagtctggagcaataatgccggtcaaatcaacctgttaaggtgg

SEQ ID NO: 1293 - DNA, 40 bp, Artificial sequence
  artificial DNA molecule for generation of DNA nanostructure
attactaattccacacacgatttaggaaaggaagggaaga

SEQ ID NO: 1294 - DNA, 48 bp, Artificial sequence
  artificial DNA molecule for generation of DNA nanostructure
ggagcggaattatcattcaatatctgctttccaggaacggagccgttt

SEQ ID NO: 1295 - DNA, 40 bp, Artificial sequence
  artificial DNA molecule for generation of DNA nanostructure
ccccctgcgtaatgggcacagaaaaagcctgtttagtatc

SEQ ID NO: 1296 - DNA, 38 bp, Artificial sequence
  artificial DNA molecule for generation of DNA nanostructure
ttaattaatttttttttccttagaatccttgaaaacat

SEQ ID NO: 1297 - DNA, 32 bp, Artificial sequence
  artificial DNA molecule for generation of DNA nanostructure
tttcacggtgcggccagaatgcggctactaat

SEQ ID NO: 1298 - DNA, 48 bp, Artificial sequence
  artificial DNA molecule for generation of DNA nanostructure
caataaaccgggccgtgcctcctcatccagcgtgccggtgatttcaac

SEQ ID NO: 1299 - DNA, 36 bp, Artificial sequence
  artificial DNA molecule for generation of DNA nanostructure
aaagtaatcagctaatgcagaacgcgctaagagaat

SEQ ID NO: 1300 - DNA, 39 bp, Artificial sequence
  artificial DNA molecule for generation of DNA nanostructure
gaatcttagcacccagctacaattcatcatcagttgaga

SEQ ID NO: 1301 - DNA, 47 bp, Artificial sequence
  artificial DNA molecule for generation of DNA nanostructure
taaataaggatattttagttttttaatttcgcgagatttttaacttt

SEQ ID NO: 1302 - DNA, 47 bp, Artificial sequence
  artificial DNA molecule for generation of DNA nanostructure
agcttgacggggaaagtttatcctaacaccggttgaggttttgaagc

SEQ ID NO: 1303 - DNA, 40 bp, Artificial sequence
  artificial DNA molecule for generation of DNA nanostructure
ttctaagaaacaagcatacgccagccaccgagttgtagca

SEQ ID NO: 1304 - DNA, 46 bp, Artificial sequence
  artificial DNA molecule for generation of DNA nanostructure
atccggtattcaaatgtaatttaggaggttgtttttgttatataac

SEQ ID NO: 1305 - DNA, 48 bp, Artificial sequence
  artificial DNA molecule for generation of DNA nanostructure
aaataatacaatagataagtcctgaacatgtttctgtccagacgacga

SEQ ID NO: 1306 - DNA, 40 bp, Artificial sequence
  artificial DNA molecule for generation of DNA nanostructure
tcccatcctaatttatggggcgctaaagggatataaggcc

SEQ ID NO: 1307 - DNA, 47 bp, Artificial sequence
  artificial DNA molecule for generation of DNA nanostructure
tagaaaccaggcattttcgagccagtaactgttaacaacatcgtagg

SEQ ID NO: 1308 - DNA, 48 bp, Artificial sequence
  artificial DNA molecule for generation of DNA nanostructure
tttacatcgggagaatttttcaataatattagactttttttacaaaca

SEQ ID NO: 1309 - DNA, 47 bp, Artificial sequence
  artificial DNA molecule for generation of DNA nanostructure
ttcgcaaatggtcaataccatcaaaatacttttgcgaggaccgcgcc

SEQ ID NO: 1310 - DNA, 40 bp, Artificial sequence
  artificial DNA molecule for generation of DNA nanostructure
tttagaagcggattcgccttaaaacgaactaacatcaata

SEQ ID NO: 1311 - DNA, 51 bp, Artificial sequence
  artificial DNA molecule for generation of DNA nanostructure
ttgacgggacaccagaataatcctgattgtttgtaccagtctgctttgaat

SEQ ID NO: 1312 - DNA, 39 bp, Artificial sequence
  artificial DNA molecule for generation of DNA nanostructure
cgtcagcgcggccagagcagttgggcggttggcatagta

SEQ ID NO: 1313 - DNA, 40 bp, Artificial sequence
  artificial DNA molecule for generation of DNA nanostructure
aaatctacgttaagataggacgttgggaagaatcaactaa

SEQ ID NO: 1314 - DNA, 40 bp, Artificial sequence
  artificial DNA molecule for generation of DNA nanostructure
cataacgccaaaaggaattacgagtgtacatcggcaaacg

SEQ ID NO: 1315 - DNA, 43 bp, Artificial sequence
  artificial DNA molecule for generation of DNA nanostructure
agagacgcagaaacagcggagggcgatcggtgcggtatcggcc

SEQ ID NO: 1316 - DNA, 49 bp, Artificial sequence
  artificial DNA molecule for generation of DNA nanostructure
taccacataaatagttgctattttccaacgctaacgtttttgcgtcttt

SEQ ID NO: 1317 - DNA, 46 bp, Artificial sequence
  artificial DNA molecule for generation of DNA nanostructure
ccgccttttttcaacagtgccaggttatctatttttaatatcttta

SEQ ID NO: 1318 - DNA, 47 bp, Artificial sequence
  artificial DNA molecule for generation of DNA nanostructure
tcagcagctgccgccagcacatcctcataacttttaaataaaaattt

SEQ ID NO: 1319 - DNA, 38 bp, Artificial sequence
  artificial DNA molecule for generation of DNA nanostructure
tggcaagtgtagcggccggcgaaggtcactgaatcata

SEQ ID NO: 1320 - DNA, 32 bp, Artificial sequence
  artificial DNA molecule for generation of DNA nanostructure
tggcaattcggaacaacgtactatcgttttag

SEQ ID NO: 1321 - DNA, 45 bp, Artificial sequence
  artificial DNA molecule for generation of DNA nanostructure
cgtcaatagatgacctgaaagcgtttttaagaatactggccaaca

SEQ ID NO: 1322 - DNA, 47 bp, Artificial sequence
  artificial DNA molecule for generation of DNA nanostructure
cattattacttaaatcaagatagaagatgatgacgcgaggggttgct

SEQ ID NO: 1323 - DNA, 47 bp, Artificial sequence
  artificial DNA molecule for generation of DNA nanostructure
tggtctggtagggcgcagagcaacactatcataaccctctgctcatt

SEQ ID NO: 1324 - DNA, 38 bp, Artificial sequence
  artificial DNA molecule for generation of DNA nanostructure
gattatacttctgaataattttttgaagggttagaacc

SEQ ID NO: 1325 - DNA, 39 bp, Artificial sequence
  artificial DNA molecule for generation of DNA nanostructure
gcagcctctggccacacccgccgtgcggctgcaatagca

SEQ ID NO: 1326 - DNA, 46 bp, Artificial sequence
  artificial DNA molecule for generation of DNA nanostructure
tcgttagagaaggcttcgaacctctatacaacgttaaataagaata

SEQ ID NO: 1327 - DNA, 39 bp, Artificial sequence
  artificial DNA molecule for generation of DNA nanostructure
tataacgtggtcagtagcatcaccttgctgaattaaccg

SEQ ID NO: 1328 - DNA, 48 bp, Artificial sequence
  artificial DNA molecule for generation of DNA nanostructure
cagatataatcagagcgcgccgcttgacgttttttcgtctccgcacag

SEQ ID NO: 1329 - DNA, 47 bp, Artificial sequence
  artificial DNA molecule for generation of DNA nanostructure
caggtagaaagatcgctgcgcgtaaccatgcatgagccgcgtggcga

SEQ ID NO: 1330 - DNA, 40 bp, Artificial sequence
  artificial DNA molecule for generation of DNA nanostructure
tcaggaagaatcagaaaagccccattcccaataaagaatt

SEQ ID NO: 1331 - DNA, 37 bp, Artificial sequence
  artificial DNA molecule for generation of DNA nanostructure
gcaatgctcacatgtcaatcatgaccattcattaaca

SEQ ID NO: 1332 - DNA, 49 bp, Artificial sequence
  artificial DNA molecule for generation of DNA nanostructure
atacttctttgattagcaaatgaagaagtgttaatacatttgaagcacg

SEQ ID NO: 1333 - DNA, 40 bp, Artificial sequence
  artificial DNA molecule for generation of DNA nanostructure
gaaaggaattgaggaacgctgagagccagcagtaataaca

SEQ ID NO: 1334 - DNA, 40 bp, Artificial sequence
  artificial DNA molecule for generation of DNA nanostructure
tagctatattttcatttcacgcaaacctcaaattttagac

SEQ ID NO: 1335 - DNA, 38 bp, Artificial sequence
  artificial DNA molecule for generation of DNA nanostructure
aaccgcaatgccggaccgtcataatacctgcacgagct

SEQ ID NO: 1336 - DNA, 48 bp, Artificial sequence
  artificial DNA molecule for generation of DNA nanostructure
taaaagagtctgtccacgagcatgttattttcgccaacatattcttac

SEQ ID NO: 1337 - DNA, 42 bp, Artificial sequence
  artificial DNA molecule for generation of DNA nanostructure
gagatagatcacttgcctgagtagaagaattttttcaaacta

SEQ ID NO: 1338 - DNA, 38 bp, Artificial sequence
  artificial DNA molecule for generation of DNA nanostructure
acccttcttttataattctttccttttttatcattcca

SEQ ID NO: 1339 - DNA, 48 bp, Artificial sequence
  artificial DNA molecule for generation of DNA nanostructure
cagtgaggaatcctgaaaatctaatggcaaatcaacagttaaagaaac

SEQ ID NO: 1340 - DNA, 40 bp, Artificial sequence
  artificial DNA molecule for generation of DNA nanostructure
cggttgatatcgcactctcatataggagcaactgttggga

SEQ ID NO: 1341 - DNA, 40 bp, Artificial sequence
  artificial DNA molecule for generation of DNA nanostructure
catcaattaacaagaaatcagacgacacttaattgagaat

SEQ ID NO: 1342 - DNA, 32 bp, Artificial sequence
  artificial DNA molecule for generation of DNA nanostructure
ggcaaggctctgcgaacgagtagatttagttt

SEQ ID NO: 1343 - DNA, 48 bp, Artificial sequence
  artificial DNA molecule for generation of DNA nanostructure
atgtacccaatcggttttagaaccccagccagccattcaggctgcacg

SEQ ID NO: 1344 - DNA, 51 bp, Artificial sequence
  artificial DNA molecule for generation of DNA nanostructure
gtttaccatgccaagctttcagaggtgaacaatcggtcacgacaattagag

SEQ ID NO: 1345 - DNA, 40 bp, Artificial sequence
  artificial DNA molecule for generation of DNA nanostructure
caataggaacgccatccagctcatattcgcatgtagctca

SEQ ID NO: 1346 - DNA, 48 bp, Artificial sequence
  artificial DNA molecule for generation of DNA nanostructure
caccaccctacatacaacaaaaggcattaccaacttgagctcaacatt

SEQ ID NO: 1347 - DNA, 43 bp, Artificial sequence
  artificial DNA molecule for generation of DNA nanostructure
cgaaccagccatgaccgtaatgggttcgcgtctacagcgccat

SEQ ID NO: 1348 - DNA, 48 bp, Artificial sequence
  artificial DNA molecule for generation of DNA nanostructure
ctggtgccggaagacttcaaatattagatgggttgttaaatttttaac

SEQ ID NO: 1349 - DNA, 40 bp, Artificial sequence
  artificial DNA molecule for generation of DNA nanostructure
aaatgtgagcgagtaaagctttcacatttggggcgcagtc

SEQ ID NO: 1350 - DNA, 39 bp, Artificial sequence
  artificial DNA molecule for generation of DNA nanostructure
ggaaggtatacaggagtctgaattaagccagacgggaac

SEQ ID NO: 1351 - DNA, 47 bp, Artificial sequence
  artificial DNA molecule for generation of DNA nanostructure
ggataacctcaccggagagccgccaatggaaacagacggttgttact

SEQ ID NO: 1352 - DNA, 37 bp, Artificial sequence
  artificial DNA molecule for generation of DNA nanostructure
tcgcgcagaggcgttatacagtaagtaaaacagaaat

SEQ ID NO: 1353 - DNA, 39 bp, Artificial sequence
  artificial DNA molecule for generation of DNA nanostructure
gggacattcgtggcacaggtgaggaacaactgcagaaga

SEQ ID NO: 1354 - DNA, 40 bp, Artificial sequence
  artificial DNA molecule for generation of DNA nanostructure
ctgtagcgattagacgcagagagacagcatcgattcggtc

SEQ ID NO: 1355 - DNA, 36 bp, Artificial sequence
  artificial DNA molecule for generation of DNA nanostructure
aaagaaattgcgttaaatcctttgcccgattcgaca

SEQ ID NO: 1356 - DNA, 37 bp, Artificial sequence
  artificial DNA molecule for generation of DNA nanostructure
taaaacagagacaataaaccaccaaatagattagagc

SEQ ID NO: 1357 - DNA, 47 bp, Artificial sequence
  artificial DNA molecule for generation of DNA nanostructure
aatcaccggaaccagagccacgccgttttcatgcctttagcgtcaga

SEQ ID NO: 1358 - DNA, 48 bp, Artificial sequence
  artificial DNA molecule for generation of DNA nanostructure
ccgccgcctgacaagaaaacagggtgccactaccattaaacgggtaaa

SEQ ID NO: 1359 - DNA, 44 bp, Artificial sequence
  artificial DNA molecule for generation of DNA nanostructure
cagtgcctcaagagtaatctagcattgaagaaccaccaccagag

SEQ ID NO: 1360 - DNA, 43 bp, Artificial sequence
  artificial DNA molecule for generation of DNA nanostructure
aaaactagaccgttctagctgataaatacaagagatgtgtagg

SEQ ID NO: 1361 - DNA, 45 bp, Artificial sequence
  artificial DNA molecule for generation of DNA nanostructure
caaaagggtgagacaatcattgccgcggcctttagtgatgaaggg

SEQ ID NO: 1362 - DNA, 36 bp, Artificial sequence
  artificial DNA molecule for generation of DNA nanostructure
ggagacagagagggtagctatttttgagagatctac

SEQ ID NO: 1363 - DNA, 37 bp, Artificial sequence
  artificial DNA molecule for generation of DNA nanostructure
cggtcttatgctgattgccgttccgacataaaaaaat

SEQ ID NO: 1364 - DNA, 44 bp, Artificial sequence
  artificial DNA molecule for generation of DNA nanostructure
cccgtaaaaaaagcgtcgctgtaaagattaacggagaagccttt

SEQ ID NO: 1365 - DNA, 43 bp, Artificial sequence
  artificial DNA molecule for generation of DNA nanostructure
gaccctgttatgatatctgagtaaatcgatgaacggtaatcgt

SEQ ID NO: 1366 - DNA, 37 bp, Artificial sequence
  artificial DNA molecule for generation of DNA nanostructure
taaagttaaacgatcagatgatgcagatatttaggaa

SEQ ID NO: 1367 - DNA, 37 bp, Artificial sequence
  artificial DNA molecule for generation of DNA nanostructure
aaaggctatcaggaccctcaacatattccacagggcg

SEQ ID NO: 1368 - DNA, 49 bp, Artificial sequence
  artificial DNA molecule for generation of DNA nanostructure
gttagcaagaatacccaaaatttttaactggcatgattgaaacaatgaa

SEQ ID NO: 1369 - DNA, 49 bp, Artificial sequence
  artificial DNA molecule for generation of DNA nanostructure
ctgtagcattccacagatttttagccctcatagttagcgtagctattaa

SEQ ID NO: 1370 - DNA, 48 bp, Artificial sequence
  artificial DNA molecule for generation of DNA nanostructure
aactaaaggaattgcgtagtaaataagttttgtcgtctttaaggagcc

SEQ ID NO: 1371 - DNA, 48 bp, Artificial sequence
  artificial DNA molecule for generation of DNA nanostructure
ttcggattatacatttattctgtccagacgggcgctagggaaaacgct

SEQ ID NO: 1372 - DNA, 47 bp, Artificial sequence
  artificial DNA molecule for generation of DNA nanostructure
tacaagttttaacggtaaagtaaacaatttcatttgaatcgttgaaa

SEQ ID NO: 1373 - DNA, 49 bp, Artificial sequence
  artificial DNA molecule for generation of DNA nanostructure
aggtgaattgagcaaaagaagatcaaaatcgcatcacgctttgccacgc

SEQ ID NO: 1374 - DNA, 48 bp, Artificial sequence
  artificial DNA molecule for generation of DNA nanostructure
cgagcatgaacaacatgttcagctacaaaaggggtcagtgtgccccct

SEQ ID NO: 1375 - DNA, 38 bp, Artificial sequence
  artificial DNA molecule for generation of DNA nanostructure
cgtctgaacaacaggacgctggcactacagggcgcgta

SEQ ID NO: 1376 - DNA, 48 bp, Artificial sequence
  artificial DNA molecule for generation of DNA nanostructure
aagactccgtaataagatcgcaagtatgtaaagcttctgtaaatcgtc

SEQ ID NO: 1377 - DNA, 48 bp, Artificial sequence
  artificial DNA molecule for generation of DNA nanostructure
acgcgcctaaaataatcatcgagaacaagcaagccgttttaacatgta

SEQ ID NO: 1378 - DNA, 41 bp, Artificial sequence
  artificial DNA molecule for generation of DNA nanostructure
agagcgtttaacgtgctttcctcgtcgcgcttaaacatcac

SEQ ID NO: 1379 - DNA, 39 bp, Artificial sequence
  artificial DNA molecule for generation of DNA nanostructure
acgatctagaattttctgtattttttggatttgagaata

SEQ ID NO: 1380 - DNA, 38 bp, Artificial sequence
  artificial DNA molecule for generation of DNA nanostructure
taaacatcccttacaagttgcgctcggaacgtagaatc

SEQ ID NO: 1381 - DNA, 40 bp, Artificial sequence
  artificial DNA molecule for generation of DNA nanostructure
gaaaattcatatggttttttttccagcgccaaagacaaaa

SEQ ID NO: 1382 - DNA, 48 bp, Artificial sequence
  artificial DNA molecule for generation of DNA nanostructure
aaaggaaccgcgagaaaattttttttttcaaatatatagccaaaatca

SEQ ID NO: 1383 - DNA, 46 bp, Artificial sequence
  artificial DNA molecule for generation of DNA nanostructure
ttaattttccctttttttgaatccttgaaaacatagcgtaggtctg

SEQ ID NO: 1384 - DNA, 50 bp, Artificial sequence
  artificial DNA molecule for generation of DNA nanostructure
ctatggaataccgttgtcatggaaacagaggcggtcagtattaatttagg

SEQ ID NO: 1385 - DNA, 41 bp, Artificial sequence
  artificial DNA molecule for generation of DNA nanostructure
acacccgcagggtagcaacggctaagacagcacgacaatga

SEQ ID NO: 1386 - DNA, 40 bp, Artificial sequence
  artificial DNA molecule for generation of DNA nanostructure
gaaacatgaaagtaatggcattttggaaccagagccacca

SEQ ID NO: 1387 - DNA, 40 bp, Artificial sequence
  artificial DNA molecule for generation of DNA nanostructure
agtgtagcggtcacgcacgtggcgtttacattacaatatt

SEQ ID NO: 1388 - DNA, 49 bp, Artificial sequence
  artificial DNA molecule for generation of DNA nanostructure
tatcttaccgcgtttttttttcatcaagagcaaccgtataacaaatcca

SEQ ID NO: 1389 - DNA, 48 bp, Artificial sequence
  artificial DNA molecule for generation of DNA nanostructure
tagcaatagctaacccacatttttgaattgagttaagcccccagacgt

SEQ ID NO: 1390 - DNA, 42 bp, Artificial sequence
  artificial DNA molecule for generation of DNA nanostructure
aggctgaggttttgctcagtaccagtttttcggataagtgcc

SEQ ID NO: 1391 - DNA, 48 bp, Artificial sequence
  artificial DNA molecule for generation of DNA nanostructure
caagagaagatgaaacaaacatcctatcggtttatcagcttgctttcg

SEQ ID NO: 1392 - DNA, 49 bp, Artificial sequence
  artificial DNA molecule for generation of DNA nanostructure
cgcagaggtttgaataccaagttaggattaggtattagcgaaaacctat

SEQ ID NO: 1393 - DNA, 46 bp, Artificial sequence
  artificial DNA molecule for generation of DNA nanostructure
agagactacaccggaaatcttttttttgacctaaattttgaatctt

SEQ ID NO: 1394 - DNA, 40 bp, Artificial sequence
  artificial DNA molecule for generation of DNA nanostructure
tctttaatcgctcaattaaaacagaggtgagccgccgcca

SEQ ID NO: 1395 - DNA, 45 bp, Artificial sequence
  artificial DNA molecule for generation of DNA nanostructure
tattctatctcaagaaaacaaaattttgctttgacgaagtctgtc

SEQ ID NO: 1396 - DNA, 47 bp, Artificial sequence
  artificial DNA molecule for generation of DNA nanostructure
gaacgtggactccaacgtcaaagctcacaatgccggcgatgcgcgta

SEQ ID NO: 1397 - DNA, 45 bp, Artificial sequence
  artificial DNA molecule for generation of DNA nanostructure
agttttttcggggaaatccacacatggtcatagctgttaacggca

SEQ ID NO: 1398 - DNA, 40 bp, Artificial sequence
  artificial DNA molecule for generation of DNA nanostructure
tagaaaccccaagaacgggtattaaaccaagtaccgcact

SEQ ID NO: 1399 - DNA, 46 bp, Artificial sequence
  artificial DNA molecule for generation of DNA nanostructure
tgagagccagcagcctgattgccgaattattcaggagctaaacagg

SEQ ID NO: 1400 - DNA, 32 bp, Artificial sequence
  artificial DNA molecule for generation of DNA nanostructure
aaatgaaaggccaccgttagtaatatgcgccg

SEQ ID NO: 1401 - DNA, 44 bp, Artificial sequence
  artificial DNA molecule for generation of DNA nanostructure
taagaataaaccttttttttttacctccggcttaggttgggtta

SEQ ID NO: 1402 - DNA, 47 bp, Artificial sequence
  artificial DNA molecule for generation of DNA nanostructure
gtgagtgattttttcataccttttacagttaaccttgagtccaccct

SEQ ID NO: 1403 - DNA, 48 bp, Artificial sequence
  artificial DNA molecule for generation of DNA nanostructure
acgtagaaaaccgccaccttttttcagagccaaacagtgcgggcgaca

SEQ ID NO: 1404 - DNA, 46 bp, Artificial sequence
  artificial DNA molecule for generation of DNA nanostructure
gggggttcgtaatcaacatacgagccggaactattaaaggtgccgt

SEQ ID NO: 1405 - DNA, 37 bp, Artificial sequence
  artificial DNA molecule for generation of DNA nanostructure
aatcacccggtcatagccccctattagcgggactcct

SEQ ID NO: 1406 - DNA, 47 bp, Artificial sequence
  artificial DNA molecule for generation of DNA nanostructure
ggaaggttatctaaaatatccacttctttgaagtaaaaggcacgtat

SEQ ID NO: 1407 - DNA, 40 bp, Artificial sequence
  artificial DNA molecule for generation of DNA nanostructure
agaatataaagtaccgaatgcagattcgatgatacaggag

SEQ ID NO: 1408 - DNA, 40 bp, Artificial sequence
  artificial DNA molecule for generation of DNA nanostructure
gaccgtgtgataaatacatatttaacaacgcctattttca

SEQ ID NO: 1409 - DNA, 44 bp, Artificial sequence
  artificial DNA molecule for generation of DNA nanostructure
ttttatcctaagtcctggtaaatattgatttttggaaattattc

SEQ ID NO: 1410 - DNA, 34 bp, Artificial sequence
  artificial DNA molecule for generation of DNA nanostructure
accaacgttttttaacgagcgtctttagttgcta

SEQ ID NO: 1411 - DNA, 39 bp, Artificial sequence
  artificial DNA molecule for generation of DNA nanostructure
agcactaagccattgatggattaagaaaggactacgtga

SEQ ID NO: 1412 - DNA, 37 bp, Artificial sequence
  artificial DNA molecule for generation of DNA nanostructure
cagtagggcttatttttttgagaatcgcaggcgttaa

SEQ ID NO: 1413 - DNA, 45 bp, Artificial sequence
  artificial DNA molecule for generation of DNA nanostructure
acaatagaaatggtttttattactttttgcagtatagctttagtt

SEQ ID NO: 1414 - DNA, 45 bp, Artificial sequence
  artificial DNA molecule for generation of DNA nanostructure
gaggcaggtcagacgattgtttttccttgccattagcaaggccgg

SEQ ID NO: 1415 - DNA, 38 bp, Artificial sequence
  artificial DNA molecule for generation of DNA nanostructure
aggaggttcagagccgccaccagaataatcaagcctat

SEQ ID NO: 1416 - DNA, 46 bp, Artificial sequence
  artificial DNA molecule for generation of DNA nanostructure
aagcgaaaggagcgacattttgagcgttaccgttccagtaagcgtc

SEQ ID NO: 1417 - DNA, 42 bp, Artificial sequence
  artificial DNA molecule for generation of DNA nanostructure
caccattaatattcatttttaaacaaataaatcccgattgag

SEQ ID NO: 1418 - DNA, 49 bp, Artificial sequence
  artificial DNA molecule for generation of DNA nanostructure
cagctacaatcgtaggaatcattaccgcgctttttcaatagcaagcaaa

SEQ ID NO: 1419 - DNA, 39 bp, Artificial sequence
  artificial DNA molecule for generation of DNA nanostructure
atcccatcctaatttaatacatggcttttaactcattaa

SEQ ID NO: 1420 - DNA, 47 bp, Artificial sequence
  artificial DNA molecule for generation of DNA nanostructure
agccagaatggaaagcgcattgactgtactggtaatctacgacaata

SEQ ID NO: 1421 - DNA, 40 bp, Artificial sequence
  artificial DNA molecule for generation of DNA nanostructure
gcagtctctgaatcgaactgatagccctaaaagcagaaga

SEQ ID NO: 1422 - DNA, 40 bp, Artificial sequence
  artificial DNA molecule for generation of DNA nanostructure
catcgccatttgaatggctattagatggcccaagggaaga

SEQ ID NO: 1423 - DNA, 47 bp, Artificial sequence
  artificial DNA molecule for generation of DNA nanostructure
accgtctatcagggcggtctttccttatcattaatcaataatcggct

SEQ ID NO: 1424 - DNA, 40 bp, Artificial sequence
  artificial DNA molecule for generation of DNA nanostructure
agcaataccgcctgcaacagtgccatcttttcaccaccac

SEQ ID NO: 1425 - DNA, 40 bp, Artificial sequence
  artificial DNA molecule for generation of DNA nanostructure
aagaaattgcgtacggcaccttgccagttgaaaggaattg

SEQ ID NO: 1426 - DNA, 49 bp, Artificial sequence
  artificial DNA molecule for generation of DNA nanostructure
caacaaccatcgcccactttttcataaccgatatattcggttgccctgc

SEQ ID NO: 1427 - DNA, 47 bp, Artificial sequence
  artificial DNA molecule for generation of DNA nanostructure
acctgtttagctatatcccagcaggcgaaaattccacgctggtttgc

SEQ ID NO: 1428 - DNA, 47 bp, Artificial sequence
  artificial DNA molecule for generation of DNA nanostructure
accattagatacatttcgcaaatgaatcgtcagcctcagcaacgcaa

SEQ ID NO: 1429 - DNA, 39 bp, Artificial sequence
  artificial DNA molecule for generation of DNA nanostructure
cgctgaggtcgtcaccctcagtttttagcgaacagaggc

SEQ ID NO: 1430 - DNA, 49 bp, Artificial sequence
  artificial DNA molecule for generation of DNA nanostructure
acactcatgaatgccaacggcagcgtcagcgggagcaaaaatgtgccgg

SEQ ID NO: 1431 - DNA, 38 bp, Artificial sequence
  artificial DNA molecule for generation of DNA nanostructure
cgacaactgataatacatttgaggcagttggcttattt

SEQ ID NO: 1432 - DNA, 37 bp, Artificial sequence
  artificial DNA molecule for generation of DNA nanostructure
gcataaagtgtatttttagcctggggtgtgaggatcc

SEQ ID NO: 1433 - DNA, 45 bp, Artificial sequence
  artificial DNA molecule for generation of DNA nanostructure
cgtattaaatcctttgccctttttaacgtaccgaacgaaccacca

SEQ ID NO: 1434 - DNA, 45 bp, Artificial sequence
  artificial DNA molecule for generation of DNA nanostructure
cagtgagactgttcttgctggtatttttatatccaacctcatacc

SEQ ID NO: 1435 - DNA, 48 bp, Artificial sequence
  artificial DNA molecule for generation of DNA nanostructure
tggtttttgcccttcatcccttataaatcaaaagaatagcactcacat

SEQ ID NO: 1436 - DNA, 39 bp, Artificial sequence
  artificial DNA molecule for generation of DNA nanostructure
tttcccaattgtaaataaccaatgctaaatcggggcgcg

SEQ ID NO: 1437 - DNA, 47 bp, Artificial sequence
  artificial DNA molecule for generation of DNA nanostructure
gcgattaagttgggtaacgctcctcgtaaaacattgcctagattcaa

SEQ ID NO: 1438 - DNA, 37 bp, Artificial sequence
  artificial DNA molecule for generation of DNA nanostructure
aaatcaatgaacctcaaatatccagtacctaacgtca

SEQ ID NO: 1439 - DNA, 44 bp, Artificial sequence
  artificial DNA molecule for generation of DNA nanostructure
cgggtaccgaagcggtgtttttcggtgccccctgcatcagacga

SEQ ID NO: 1440 - DNA, 40 bp, Artificial sequence
  artificial DNA molecule for generation of DNA nanostructure
tgagcctcctcacagtcctaatgagtgagctaccgagata

SEQ ID NO: 1441 - DNA, 32 bp, Artificial sequence
  artificial DNA molecule for generation of DNA nanostructure
gccattcgtatcaggtctagcatgcatatatt

SEQ ID NO: 1442 - DNA, 49 bp, Artificial sequence
  artificial DNA molecule for generation of DNA nanostructure
gaacaatattgcctgagtagtttttagaactcaaactaaatcctgagaa

SEQ ID NO: 1443 - DNA, 40 bp, Artificial sequence
  artificial DNA molecule for generation of DNA nanostructure
ggagaagcctttatttagcataaaaggaacgcggcggatt

SEQ ID NO: 1444 - DNA, 40 bp, Artificial sequence
  artificial DNA molecule for generation of DNA nanostructure
gggaaacctgtcgtgccgccagggggcagatgatggcaat

SEQ ID NO: 1445 - DNA, 46 bp, Artificial sequence
  artificial DNA molecule for generation of DNA nanostructure
aaaccaggcaaagcacggaacggtctggtcagctcaccatcaatat

SEQ ID NO: 1446 - DNA, 49 bp, Artificial sequence
  artificial DNA molecule for generation of DNA nanostructure
tggtgctgtgccggacttgtagaatacagtaaaaaccctccaaaaaaca

SEQ ID NO: 1447 - DNA, 46 bp, Artificial sequence
  artificial DNA molecule for generation of DNA nanostructure
ctgcagccgctcgaatttctgtttttcagcacgcgtgccctaaagg

SEQ ID NO: 1448 - DNA, 48 bp, Artificial sequence
  artificial DNA molecule for generation of DNA nanostructure
gatgaatacaccgtcggtggtacgaaagaggcaaaagaatacactaaa

SEQ ID NO: 1449 - DNA, 46 bp, Artificial sequence
  artificial DNA molecule for generation of DNA nanostructure
caaaaacattatgcgtttttgttggtaggagcggaattatcatcat

SEQ ID NO: 1450 - DNA, 48 bp, Artificial sequence
  artificial DNA molecule for generation of DNA nanostructure
tcggccttttccagtcctgtggtgagtgtcactgagccgggtcactgt

SEQ ID NO: 1451 - DNA, 42 bp, Artificial sequence
  artificial DNA molecule for generation of DNA nanostructure
caggttttttacatcgggagaaacattttttaacggattcgc

SEQ ID NO: 1452 - DNA, 45 bp, Artificial sequence
  artificial DNA molecule for generation of DNA nanostructure
gaaataaatgccatcccacgcaaccatgtgtaggtaagagagtct

SEQ ID NO: 1453 - DNA, 48 bp, Artificial sequence
  artificial DNA molecule for generation of DNA nanostructure
tgtttttataaggccgatttttttaagggattttagacagggccgctt

SEQ ID NO: 1454 - DNA, 49 bp, Artificial sequence
  artificial DNA molecule for generation of DNA nanostructure
aagcactaagggttgagtgttgttccagtttttttggaacaagagtcca

SEQ ID NO: 1455 - DNA, 49 bp, Artificial sequence
  artificial DNA molecule for generation of DNA nanostructure
atcagtgaaatctatttttaagcattacgccaggggttagatgtgcact

SEQ ID NO: 1456 - DNA, 46 bp, Artificial sequence
  artificial DNA molecule for generation of DNA nanostructure
ggctggtaatgggtttttaaaggtttctttgctcgtcacgggttac

SEQ ID NO: 1457 - DNA, 47 bp, Artificial sequence
  artificial DNA molecule for generation of DNA nanostructure
gggcgcggtccattaaagcggggtacctaccacttctgaagtcaata

SEQ ID NO: 1458 - DNA, 40 bp, Artificial sequence
  artificial DNA molecule for generation of DNA nanostructure
aacggtaaggcaccgcttctgcaatatctggtatttagaa

SEQ ID NO: 1459 - DNA, 38 bp, Artificial sequence
  artificial DNA molecule for generation of DNA nanostructure
tttaagaactggctcaagcgcgaaactgaccggagaca

SEQ ID NO: 1460 - DNA, 40 bp, Artificial sequence
  artificial DNA molecule for generation of DNA nanostructure
ccgtgcatgaccgtaatgggatagtttcatttggttgtac

SEQ ID NO: 1461 - DNA, 41 bp, Artificial sequence
  artificial DNA molecule for generation of DNA nanostructure
gtcaaaagcaagggtgagaaaggccagaacccttcaatcat

SEQ ID NO: 1462 - DNA, 41 bp, Artificial sequence
  artificial DNA molecule for generation of DNA nanostructure
aaatttttaactttgaaagaggacgggaaccgaacaaagta

SEQ ID NO: 1463 - DNA, 39 bp, Artificial sequence
  artificial DNA molecule for generation of DNA nanostructure
ccgcctggccctgagaattcctgattatccaaaacatta

SEQ ID NO: 1464 - DNA, 48 bp, Artificial sequence
  artificial DNA molecule for generation of DNA nanostructure
gcacgtgagttacggcttcggccaacgcgaccctgtaatattttgtta

SEQ ID NO: 1465 - DNA, 47 bp, Artificial sequence
  artificial DNA molecule for generation of DNA nanostructure
atttcctgattgtttttaatgaaggaggtgtccagcatcacgggtaa

SEQ ID NO: 1466 - DNA, 34 bp, Artificial sequence
  artificial DNA molecule for generation of DNA nanostructure
gagcccctttttgatttagagcttgaggggtcga

SEQ ID NO: 1467 - DNA, 40 bp, Artificial sequence
  artificial DNA molecule for generation of DNA nanostructure
ggcagattcaccagtcatttttacgaccagtaataaaagg

SEQ ID NO: 1468 - DNA, 48 bp, Artificial sequence
  artificial DNA molecule for generation of DNA nanostructure
gagttgcacggtttgcgtattgggcagctgcaggattatatatcaaaa

SEQ ID NO: 1469 - DNA, 40 bp, Artificial sequence
  artificial DNA molecule for generation of DNA nanostructure
gcaagcggcctgtttgatggtggttccgaaatcggcaaaa

SEQ ID NO: 1470 - DNA, 50 bp, Artificial sequence
  artificial DNA molecule for generation of DNA nanostructure
tgagtaagcaatcgatgaaattcgcgtagcactccagccagcttcagggt

SEQ ID NO: 1471 - DNA, 46 bp, Artificial sequence
  artificial DNA molecule for generation of DNA nanostructure
gcaacaggggtaatttcattgaatccccctttagtttgtagtagca

SEQ ID NO: 1472 - DNA, 44 bp, Artificial sequence
  artificial DNA molecule for generation of DNA nanostructure
atcggaaccgggcaacctgacctgaaagtttttgtaagaatacg

SEQ ID NO: 1473 - DNA, 42 bp, Artificial sequence
  artificial DNA molecule for generation of DNA nanostructure
ttaaaaattattaattttttttaaaagtttgagtcagagata

SEQ ID NO: 1474 - DNA, 48 bp, Artificial sequence
  artificial DNA molecule for generation of DNA nanostructure
ttaccgccacaactaatatttttattagagcctaatggaagacattct

SEQ ID NO: 1475 - DNA, 38 bp, Artificial sequence
  artificial DNA molecule for generation of DNA nanostructure
tcatttttcgttaatacttttgcgttaaatgcaatgcc

SEQ ID NO: 1476 - DNA, 48 bp, Artificial sequence
  artificial DNA molecule for generation of DNA nanostructure
ttgaggacagaatgcggctttttggccgttttcacggacctcagatgc

SEQ ID NO: 1477 - DNA, 47 bp, Artificial sequence
  artificial DNA molecule for generation of DNA nanostructure
tcattttgcggaacaaaaacaatttcatcaatataaaaagggagagg

SEQ ID NO: 1478 - DNA, 40 bp, Artificial sequence
  artificial DNA molecule for generation of DNA nanostructure
gtcacgttaaatcagccctcaggaagatcttagactttac

SEQ ID NO: 1479 - DNA, 40 bp, Artificial sequence
  artificial DNA molecule for generation of DNA nanostructure
agaaaccaccagagtagatgggcgcatcgtaaagtatcgg

SEQ ID NO: 1480 - DNA, 45 bp, Artificial sequence
  artificial DNA molecule for generation of DNA nanostructure
tcaattctagcaataaataaataagtaaaatgtttagagaagaaa

SEQ ID NO: 1481 - DNA, 48 bp, Artificial sequence
  artificial DNA molecule for generation of DNA nanostructure
taaagactttttcatgttgcgggacttgcagggagttaaagcaccaac

SEQ ID NO: 1482 - DNA, 44 bp, Artificial sequence
  artificial DNA molecule for generation of DNA nanostructure
aaagaagtttacggaactttttacattattacaggtagaaagat

SEQ ID NO: 1483 - DNA, 47 bp, Artificial sequence
  artificial DNA molecule for generation of DNA nanostructure
cggtccgtaaccgccagaaccggatatggagaattaactaaaagtaa

SEQ ID NO: 1484 - DNA, 42 bp, Artificial sequence
  artificial DNA molecule for generation of DNA nanostructure
cgttccgtggcagcctccggccagatttttcacatcctcata

SEQ ID NO: 1485 - DNA, 50 bp, Artificial sequence
  artificial DNA molecule for generation of DNA nanostructure
tagacgtcaaaagttactataaaaggcccgatagcagcaccgtaccgcca

SEQ ID NO: 1486 - DNA, 46 bp, Artificial sequence
  artificial DNA molecule for generation of DNA nanostructure
ggtaaacttgacaaccctcagacagggatagcaagcccaataggaa

SEQ ID NO: 1487 - DNA, 49 bp, Artificial sequence
  artificial DNA molecule for generation of DNA nanostructure
taggtgtaggttgatataagtatatttttcgtggtgcgggccgatgaag

SEQ ID NO: 1488 - DNA, 40 bp, Artificial sequence
  artificial DNA molecule for generation of DNA nanostructure
aagggatagctctaattagagccagcaaaatcaaacgtca

SEQ ID NO: 1489 - DNA, 46 bp, Artificial sequence
  artificial DNA molecule for generation of DNA nanostructure
tcaactttaatcattttttgtgaattaccttatgcgatttaataaa

SEQ ID NO: 1490 - DNA, 46 bp, Artificial sequence
  artificial DNA molecule for generation of DNA nanostructure
tgcctttagcgtcagtcgagagtcaccgtactcaatatcagagaga

SEQ ID NO: 1491 - DNA, 48 bp, Artificial sequence
  artificial DNA molecule for generation of DNA nanostructure
ggtgtacaaacgccaaaatttttgaattacgaggcattaaaatctacg

SEQ ID NO: 1492 - DNA, 40 bp, Artificial sequence
  artificial DNA molecule for generation of DNA nanostructure
accagtagcaccgtcaccgacttgtcccgactagccatat

SEQ ID NO: 1493 - DNA, 38 bp, Artificial sequence
  artificial DNA molecule for generation of DNA nanostructure
atagcttagattaagagtacaaaaactttcagtaattg

SEQ ID NO: 1494 - DNA, 47 bp, Artificial sequence
  artificial DNA molecule for generation of DNA nanostructure
ggcgttttagcgaaccttaattgctgaatatacggatggcttagagc

SEQ ID NO: 1495 - DNA, 42 bp, Artificial sequence
  artificial DNA molecule for generation of DNA nanostructure
ctgccagttttaccattttttcccggaatttgtgttaaatgt

SEQ ID NO: 1496 - DNA, 47 bp, Artificial sequence
  artificial DNA molecule for generation of DNA nanostructure
accagaaccttcatcatgctcattaaaaaagcacatcgaccggccag

SEQ ID NO: 1497 - DNA, 41 bp, Artificial sequence
  artificial DNA molecule for generation of DNA nanostructure
ctttacagacagtttcagcggagttgctaaacctacaacgc

SEQ ID NO: 1498 - DNA, 47 bp, Artificial sequence
  artificial DNA molecule for generation of DNA nanostructure
agaaggcttatccggtattctaaaaattctttaatttgcatgaaaat

SEQ ID NO: 1499 - DNA, 48 bp, Artificial sequence
  artificial DNA molecule for generation of DNA nanostructure
gaccaggcgcataggcggaacgagcgacctgctccatgttccaccacc

SEQ ID NO: 1500 - DNA, 47 bp, Artificial sequence
  artificial DNA molecule for generation of DNA nanostructure
gactttctccgtggtgtaacctcactcatttgccgccgcaaatatcg

SEQ ID NO: 1501 - DNA, 37 bp, Artificial sequence
  artificial DNA molecule for generation of DNA nanostructure
caaatgctttaatttttcagttcagaaaggcttttgc

SEQ ID NO: 1502 - DNA, 49 bp, Artificial sequence
  artificial DNA molecule for generation of DNA nanostructure
cccatgtataccgccaccctcaggcccggaagcagatagccttcaagtt

SEQ ID NO: 1503 - DNA, 40 bp, Artificial sequence
  artificial DNA molecule for generation of DNA nanostructure
ttgtttaacgtcaaaacagttacaaatcaatatgaattat

SEQ ID NO: 1504 - DNA, 49 bp, Artificial sequence
  artificial DNA molecule for generation of DNA nanostructure
caacggagatttgtatcttttttcgcctgataaattgtgtcgtttaatt

SEQ ID NO: 1505 - DNA, 39 bp, Artificial sequence
  artificial DNA molecule for generation of DNA nanostructure
gaaatccggcgcagacggtcattttttcataaagatgaa

SEQ ID NO: 1506 - DNA, 46 bp, Artificial sequence
  artificial DNA molecule for generation of DNA nanostructure
tatttatcccaattcaaagacacgggcacggaaaaagagacgcaga

SEQ ID NO: 1507 - DNA, 47 bp, Artificial sequence
  artificial DNA molecule for generation of DNA nanostructure
aaacagcagttgggcaagaggaaatcaacgtaacaaagcagagtaat

SEQ ID NO: 1508 - DNA, 48 bp, Artificial sequence
  artificial DNA molecule for generation of DNA nanostructure
tgagagatctgatattcaatttttcgttctagctgataaaacttagcc

SEQ ID NO: 1509 - DNA, 39 bp, Artificial sequence
  artificial DNA molecule for generation of DNA nanostructure
ccctcagaatacatatttgtcacaaataaactgcgggag

SEQ ID NO: 1510 - DNA, 47 bp, Artificial sequence
  artificial DNA molecule for generation of DNA nanostructure
cggaaccgcctccctcagagatcaaccgaggtttttaaggaacaccc

SEQ ID NO: 1511 - DNA, 34 bp, Artificial sequence
  artificial DNA molecule for generation of DNA nanostructure
aggcaaatttttaattagcaaaattaactaatag

SEQ ID NO: 1512 - DNA, 45 bp, Artificial sequence
  artificial DNA molecule for generation of DNA nanostructure
aactccaaaccagacgaacaggatttttagattgtggaagtaaga

SEQ ID NO: 1513 - DNA, 48 bp, Artificial sequence
  artificial DNA molecule for generation of DNA nanostructure
aaccagacagtaccttctaaagtacggtgtctggaagtttatcaaaaa

SEQ ID NO: 1514 - DNA, 45 bp, Artificial sequence
  artificial DNA molecule for generation of DNA nanostructure
aatcggcgaaacgtacagctttttccatgttgaggggacgacgac

SEQ ID NO: 1515 - DNA, 38 bp, Artificial sequence
  artificial DNA molecule for generation of DNA nanostructure
ccggaaactgccaagctttcagagcgccagctcggcct

SEQ ID NO: 1516 - DNA, 37 bp, Artificial sequence
  artificial DNA molecule for generation of DNA nanostructure
ggcgaaattgggaagggcgatcctcgtcgcgcaaacg

SEQ ID NO: 1517 - DNA, 32 bp, Artificial sequence
  artificial DNA molecule for generation of DNA nanostructure
gactgtagcgaagcccaaacgcaaacataaaa

SEQ ID NO: 1518 - DNA, 46 bp, Artificial sequence
  artificial DNA molecule for generation of DNA nanostructure
acgaactatgccagagctatcttttttaaccctcgttttacaggca

SEQ ID NO: 1519 - DNA, 41 bp, Artificial sequence
  artificial DNA molecule for generation of DNA nanostructure
agcgctaggtgaacaaagtcagaggagagaatataataacg

SEQ ID NO: 1520 - DNA, 46 bp, Artificial sequence
  artificial DNA molecule for generation of DNA nanostructure
aatttctcataatttaaagccaacgctcaatcagatatttttgcac

SEQ ID NO: 1521 - DNA, 40 bp, Artificial sequence
  artificial DNA molecule for generation of DNA nanostructure
aaccaaaatagcgagaacgagaatgaccataacattccat

SEQ ID NO: 1522 - DNA, 40 bp, Artificial sequence
  artificial DNA molecule for generation of DNA nanostructure
catttttgatgctgtagctcaacatgttttaaatatgcaa

SEQ ID NO: 1523 - DNA, 40 bp, Artificial sequence
  artificial DNA molecule for generation of DNA nanostructure
gttaaacgatgctatgcgcaactggggggatgtgctgcaa

SEQ ID NO: 1524 - DNA, 40 bp, Artificial sequence
  artificial DNA molecule for generation of DNA nanostructure
catcaaaaataattcgcttttttctggccttcctgtagcc

SEQ ID NO: 1525 - DNA, 49 bp, Artificial sequence
  artificial DNA molecule for generation of DNA nanostructure
acaaaggcccattctttttaggctgccggagagatcccgtacacattca

SEQ ID NO: 1526 - DNA, 40 bp, Artificial sequence
  artificial DNA molecule for generation of DNA nanostructure
cagaaggaagtagcgacagaacttcgctattagtggagcc

SEQ ID NO: 1527 - DNA, 49 bp, Artificial sequence
  artificial DNA molecule for generation of DNA nanostructure
taacatccaataacagttgattcccaattctttttgcgaacgagtagat

SEQ ID NO: 1528 - DNA, 44 bp, Artificial sequence
  artificial DNA molecule for generation of DNA nanostructure
ataaatcacaggtcagaacaacccgtcgtttttattctccgtgg

SEQ ID NO: 1529 - DNA, 39 bp, Artificial sequence
  artificial DNA molecule for generation of DNA nanostructure
taattgctccttttgaaacagcggatcaaacaagagata

SEQ ID NO: 1530 - DNA, 48 bp, Artificial sequence
  artificial DNA molecule for generation of DNA nanostructure
taagaggtcgttttaattcgagctaaaagattggttgtgtcgcacagg

SEQ ID NO: 1531 - DNA, 48 bp, Artificial sequence
  artificial DNA molecule for generation of DNA nanostructure
gccccaaatcagaagcactaatgctgagatttaattgggcttgagatg

SEQ ID NO: 1532 - DNA, 45 bp, Artificial sequence
  artificial DNA molecule for generation of DNA nanostructure
tcaagattccagagccaccagtaactagaaaaagcctgaatttat

SEQ ID NO: 1533 - DNA, 49 bp, Artificial sequence
  artificial DNA molecule for generation of DNA nanostructure
ataagcaaatgtaccccggttttttgataatcagaaaaggtagctattt

SEQ ID NO: 1534 - DNA, 48 bp, Artificial sequence
  artificial DNA molecule for generation of DNA nanostructure
ttagtgaacttacccaagcccgaaagactccaaataagaatggcaaca

SEQ ID NO: 1535 - DNA, 48 bp, Artificial sequence
  artificial DNA molecule for generation of DNA nanostructure
atatttaagtcacgacgttttttgtaaaacgaataaaaaaagctttca

SEQ ID NO: 1536 - DNA, 40 bp, Artificial sequence
  artificial DNA molecule for generation of DNA nanostructure
agccatttcacggaatccaatgaaaccatacgggaacgga

SEQ ID NO: 1537 - DNA, 38 bp, Artificial sequence
  artificial DNA molecule for generation of DNA nanostructure
aagtttatcataaaggacgattttacagggaagcgcat

SEQ ID NO: 1538 - DNA, 40 bp, Artificial sequence
  artificial DNA molecule for generation of DNA nanostructure
aaagcggattgcatcatcaaagcgtcaacttaaatttctg

SEQ ID NO: 1539 - DNA, 43 bp, Artificial sequence
  artificial DNA molecule for generation of DNA nanostructure
attgttatccgggcgaaaaaccatcacccaaatcatggcacag

SEQ ID NO: 1540 - DNA, 22 bp, Artificial sequence
  artificial DNA molecule for generation of DNA nanostructure
agcaaatcgtttcctgtgtgaa

SEQ ID NO: 1541 - DNA, 42 bp, Artificial sequence
  artificial DNA molecule for generation of DNA nanostructure
caattaccttcttaaacagcttgataccgatctggtgtgttc

SEQ ID NO: 1542 - DNA, 37 bp, Artificial sequence
  artificial DNA molecule for generation of DNA nanostructure
ggagggaagaacaagagtttatcaatttaggcagagg

SEQ ID NO: 1543 - DNA, 37 bp, Artificial sequence
  artificial DNA molecule for generation of DNA nanostructure
cattttcgagccagaaatacctataactaacaaagaa

SEQ ID NO: 1544 - DNA, 43 bp, Artificial sequence
  artificial DNA molecule for generation of DNA nanostructure
aataataaataacctttgctgatgttaatggaaacagtacata

SEQ ID NO: 1545 - DNA, 44 bp, Artificial sequence
  artificial DNA molecule for generation of DNA nanostructure
aatcaatatattttaattgaaaaaaaaggctccaaaatattaag

SEQ ID NO: 1546 - DNA, 43 bp, Artificial sequence
  artificial DNA molecule for generation of DNA nanostructure
ccaatactgcgggtcaataagctgaaaaggtggcagaacaaac

SEQ ID NO: 1547 - DNA, 22 bp, Artificial sequence
  artificial DNA molecule for generation of DNA nanostructure
caggacgttggctggatagcgt

SEQ ID NO: 1548 - DNA, 42 bp, Artificial sequence
  artificial DNA molecule for generation of DNA nanostructure
aaccgcaactttgacccccagcgattataccattataccagt

SEQ ID NO: 1549 - DNA, 37 bp, Artificial sequence
  artificial DNA molecule for generation of DNA nanostructure
gaacccttagctgattcttttcactaattgcgttgcg

SEQ ID NO: 1550 - DNA, 37 bp, Artificial sequence
  artificial DNA molecule for generation of DNA nanostructure
ctcactgcccgctcgcgtccgtccagcgcctgcggcc

SEQ ID NO: 1551 - DNA, 43 bp, Artificial sequence
  artificial DNA molecule for generation of DNA nanostructure
aggaagttttgcggtatgcgcgcccattgcaggcgctttcgca

SEQ ID NO: 1552 - DNA, 44 bp, Artificial sequence
  artificial DNA molecule for generation of DNA nanostructure
ctcaatccgccctaaaacgtaatgccactacgaaggaagatttt

SEQ ID NO: 1553 - DNA, 43 bp, Artificial sequence
  artificial DNA molecule for generation of DNA nanostructure
atgcgttatacgaacgcgagttttgaagccttaaaattaaagg

SEQ ID NO: 1554 - DNA, 22 bp, Artificial sequence
  artificial DNA molecule for generation of DNA nanostructure
agtcaatagtgtttagtatcat

SEQ ID NO: 1555 - DNA, 42 bp, Artificial sequence
  artificial DNA molecule for generation of DNA nanostructure
aggtttagccgtaacactgagtttcgtcaccacgctgagaag

SEQ ID NO: 1556 - DNA, 37 bp, Artificial sequence
  artificial DNA molecule for generation of DNA nanostructure
gagcgagtgattagagcggaagcatcaggtctttacc

SEQ ID NO: 1557 - DNA, 37 bp, Artificial sequence
  artificial DNA molecule for generation of DNA nanostructure
ctgactattatagacgataaatcatcagtagatacat

SEQ ID NO: 1558 - DNA, 43 bp, Artificial sequence
  artificial DNA molecule for generation of DNA nanostructure
tggctgacgagtagtaaggaataccagtgaataaggcttgccc

SEQ ID NO: 1559 - DNA, 44 bp, Artificial sequence
  artificial DNA molecule for generation of DNA nanostructure
tgacgagaaacctcattttaccgccaccctcagagttagattgc

SEQ ID NO: 1560 - DNA, 49 bp, Artificial sequence
  artificial DNA molecule for generation of DNA nanostructure
agccagctttttttcatcaacgttcatcaaaaatttttaattcgcgtct

SEQ ID NO: 1561 - DNA, 47 bp, Artificial sequence
  artificial DNA molecule for generation of DNA nanostructure
caggcccactacgacggggaaagccggctgtgcaagtgtagcggtca

SEQ ID NO: 1562 - DNA, 46 bp, Artificial sequence
  artificial DNA molecule for generation of DNA nanostructure
tgacccccagcgatctgtttttaaacaggaagtttccattaaacgg

SEQ ID NO: 1563 - DNA, 42 bp, Artificial sequence
  artificial DNA molecule for generation of DNA nanostructure
gtgaggcccgagatagggttgcgtctgtttgaccttcatttt

SEQ ID NO: 1564 - DNA, 40 bp, Artificial sequence
  artificial DNA molecule for generation of DNA nanostructure
tatttcgagttaatttcatcttctgacctttttaaattta

SEQ ID NO: 1565 - DNA, 50 bp, Artificial sequence
  artificial DNA molecule for generation of DNA nanostructure
gcccctacaaattcttactcaccggacggaaacgtcaccaatttcatatg

SEQ ID NO: 1566 - DNA, 51 bp, Artificial sequence
  artificial DNA molecule for generation of DNA nanostructure
ctgagtttcggatagcaagctttttcaataggaacccagagcctttaattg

SEQ ID NO: 1567 - DNA, 45 bp, Artificial sequence
  artificial DNA molecule for generation of DNA nanostructure
aaaggtaaacagcatcggaacccggaatagttttttgtatctata

SEQ ID NO: 1568 - DNA, 38 bp, Artificial sequence
  artificial DNA molecule for generation of DNA nanostructure
acttgcctgagtagaagaatactcacgcaagaatcaga

SEQ ID NO: 1569 - DNA, 41 bp, Artificial sequence
  artificial DNA molecule for generation of DNA nanostructure
taccgacagcagaacgcgctgaggagttgcgccgacaatga

SEQ ID NO: 1570 - DNA, 43 bp, Artificial sequence
  artificial DNA molecule for generation of DNA nanostructure
atgtagaaaccaatcaagcagataagccttatttttatcaaga

SEQ ID NO: 1571 - DNA, 48 bp, Artificial sequence
  artificial DNA molecule for generation of DNA nanostructure
aaggctccaaaagtgtgagttaaaagcgaaagagtaattcatgtaatt

SEQ ID NO: 1572 - DNA, 44 bp, Artificial sequence
  artificial DNA molecule for generation of DNA nanostructure
tacaaaatcgcgcacctcgttaattaaccgtataatcatctgaa

SEQ ID NO: 1573 - DNA, 47 bp, Artificial sequence
  artificial DNA molecule for generation of DNA nanostructure
ataagaataaacaccgcgcctgatgaggccgaaattgagaatcggag

SEQ ID NO: 1574 - DNA, 41 bp, Artificial sequence
  artificial DNA molecule for generation of DNA nanostructure
ggcgttaaaaaaagcctgtttagtatcatatgcgttactgc

SEQ ID NO: 1575 - DNA, 42 bp, Artificial sequence
  artificial DNA molecule for generation of DNA nanostructure
tgaaataccgaccgtgtgataaataaaatcaaaacagtataa

SEQ ID NO: 1576 - DNA, 40 bp, Artificial sequence
  artificial DNA molecule for generation of DNA nanostructure
cctgaacaagaaaaatataccgatcttgcaggaccgtaac

SEQ ID NO: 1577 - DNA, 49 bp, Artificial sequence
  artificial DNA molecule for generation of DNA nanostructure
gtaaaatacgaatcatatagggcttttagtaatcaggccatcttttcat

SEQ ID NO: 1578 - DNA, 38 bp, Artificial sequence
  artificial DNA molecule for generation of DNA nanostructure
aaacaataacggattagatgaatacaggaaagaatttt

SEQ ID NO: 1579 - DNA, 45 bp, Artificial sequence
  artificial DNA molecule for generation of DNA nanostructure
tcccgacttttttgcgggaggtttacaatagataagtttacgagc

SEQ ID NO: 1580 - DNA, 38 bp, Artificial sequence
  artificial DNA molecule for generation of DNA nanostructure
ttcttaaacagcttgagtgagacaacatgttggaataa

SEQ ID NO: 1581 - DNA, 44 bp, Artificial sequence
  artificial DNA molecule for generation of DNA nanostructure
ctttccagacgtactacgaagtttttcaccaacctactcatctt

SEQ ID NO: 1582 - DNA, 47 bp, Artificial sequence
  artificial DNA molecule for generation of DNA nanostructure
aaaggaacacaactttcaacaacagctacagaggctgctacgccaac

SEQ ID NO: 1583 - DNA, 46 bp, Artificial sequence
  artificial DNA molecule for generation of DNA nanostructure
gaaccgcctttttccctcagagccgccactagagccagcaaaatca

SEQ ID NO: 1584 - DNA, 45 bp, Artificial sequence
  artificial DNA molecule for generation of DNA nanostructure
aggtgaattatcggtttatcagcttatctggtcagttcttcctgt

SEQ ID NO: 1585 - DNA, 41 bp, Artificial sequence
  artificial DNA molecule for generation of DNA nanostructure
tgctttcgcattctgggcgaatctccaaaaaaggcggcaaa

SEQ ID NO: 1586 - DNA, 48 bp, Artificial sequence
  artificial DNA molecule for generation of DNA nanostructure
tattcggtcgcctgtttatcatgagccgaacagcgccaaagacaaaag

SEQ ID NO: 1587 - DNA, 21 bp, Artificial sequence
  artificial DNA molecule for generation of DNA nanostructure
gcgaataataattgagaatag

SEQ ID NO: 1588 - DNA, 39 bp, Artificial sequence
  artificial DNA molecule for generation of DNA nanostructure
ataaaagagtggactcgccagggtgctgattgcccttca

SEQ ID NO: 1589 - DNA, 45 bp, Artificial sequence
  artificial DNA molecule for generation of DNA nanostructure
cagaatcctgagaaggaaagtgttgttccaaaaaccgtctatcag

SEQ ID NO: 1590 - DNA, 40 bp, Artificial sequence
  artificial DNA molecule for generation of DNA nanostructure
cgatagcagcaccaagtcggtcatgcagtatgttagcaaa

SEQ ID NO: 1591 - DNA, 44 bp, Artificial sequence
  artificial DNA molecule for generation of DNA nanostructure
gaaaccattaggcagaagccaacggactttttcatgatgaaagt

SEQ ID NO: 1592 - DNA, 51 bp, Artificial sequence
  artificial DNA molecule for generation of DNA nanostructure
ttaccatttatctttttccgtcaccgacttgaataccgtataaacagttaa

SEQ ID NO: 1593 - DNA, 39 bp, Artificial sequence
  artificial DNA molecule for generation of DNA nanostructure
cagtagcaccaggcgacattcaatttttcgattgaggga

SEQ ID NO: 1594 - DNA, 46 bp, Artificial sequence
  artificial DNA molecule for generation of DNA nanostructure
ttaacacatggaaaatcgtcacttttcacgttgaacgaactgatag

SEQ ID NO: 1595 - DNA, 44 bp, Artificial sequence
  artificial DNA molecule for generation of DNA nanostructure
attccacaggtttcagcggagtcctcagcggccgctcaataaac

SEQ ID NO: 1596 - DNA, 48 bp, Artificial sequence
  artificial DNA molecule for generation of DNA nanostructure
tcaccagtcacacgagatagaactggtggttccctgagaggagaggcg

SEQ ID NO: 1597 - DNA, 49 bp, Artificial sequence
  artificial DNA molecule for generation of DNA nanostructure
gcagaagattttgacgaccgccagtctgtccaatcgggagataccaagt

SEQ ID NO: 1598 - DNA, 51 bp, Artificial sequence
  artificial DNA molecule for generation of DNA nanostructure
agtatcgagccagtaataaatagcaaggcaccagagccaccaccgatggtt

SEQ ID NO: 1599 - DNA, 37 bp, Artificial sequence
  artificial DNA molecule for generation of DNA nanostructure
tacctacataagggattttgctaaaactaaaggaatt

SEQ ID NO: 1600 - DNA, 48 bp, Artificial sequence
  artificial DNA molecule for generation of DNA nanostructure
ggcattttagcgagggtagcaacggccctctttttatagttcctgtag

SEQ ID NO: 1601 - DNA, 48 bp, Artificial sequence
  artificial DNA molecule for generation of DNA nanostructure
gggcaacaggtttttcttttcaccaatatcccaccgaggacagctaat

SEQ ID NO: 1602 - DNA, 31 bp, Artificial sequence
  artificial DNA molecule for generation of DNA nanostructure
cactattacgatataaatcaaaaaaaaggga

SEQ ID NO: 1603 - DNA, 40 bp, Artificial sequence
  artificial DNA molecule for generation of DNA nanostructure
ccattgcaatacagtatttcaggtttaacgtcgtaatgcc

SEQ ID NO: 1604 - DNA, 39 bp, Artificial sequence
  artificial DNA molecule for generation of DNA nanostructure
tagtaaataacttgaggactaaactcaacagattactag

SEQ ID NO: 1605 - DNA, 49 bp, Artificial sequence
  artificial DNA molecule for generation of DNA nanostructure
gtttataacaacgcaaagacaccacaacgcaattaagactcatagaaaa

SEQ ID NO: 1606 - DNA, 45 bp, Artificial sequence
  artificial DNA molecule for generation of DNA nanostructure
ccttatcgccctttttttttaagaaaagtaataatcggctgtctt

SEQ ID NO: 1607 - DNA, 46 bp, Artificial sequence
  artificial DNA molecule for generation of DNA nanostructure
gtttgcgtattgggccaacgtcaggcaaaatccctcgatttgcggg

SEQ ID NO: 1608 - DNA, 49 bp, Artificial sequence
  artificial DNA molecule for generation of DNA nanostructure
agctgcattaatgaatcggccaaggcgatggcgaaaatcggcgagaaag

SEQ ID NO: 1609 - DNA, 39 bp, Artificial sequence
  artificial DNA molecule for generation of DNA nanostructure
agcatcactatctttattaaatcctttgccccgaactaa

SEQ ID NO: 1610 - DNA, 47 bp, Artificial sequence
  artificial DNA molecule for generation of DNA nanostructure
aacactatcataaccctcgtcaatattcctgaactcgtaattagact

SEQ ID NO: 1611 - DNA, 47 bp, Artificial sequence
  artificial DNA molecule for generation of DNA nanostructure
cgcgcgggagttgcagcaagcggtccatttttgctggtttgtgccta

SEQ ID NO: 1612 - DNA, 42 bp, Artificial sequence
  artificial DNA molecule for generation of DNA nanostructure
atgagttgcccgctttccagtcgggaaaccaaatcaagccag

SEQ ID NO: 1613 - DNA, 48 bp, Artificial sequence
  artificial DNA molecule for generation of DNA nanostructure
taataaaaattgcgttgcgctcacgagctaactcacattagaacgtta

SEQ ID NO: 1614 - DNA, 39 bp, Artificial sequence
  artificial DNA molecule for generation of DNA nanostructure
tcattataccagtcaggacgttgggaagaaaacattatt

SEQ ID NO: 1615 - DNA, 31 bp, Artificial sequence
  artificial DNA molecule for generation of DNA nanostructure
acaggtagaattcgactaaaaattgacagtc

SEQ ID NO: 1616 - DNA, 41 bp, Artificial sequence
  artificial DNA molecule for generation of DNA nanostructure
cgattttaagaactggcagatttaggaataccacattcaac

SEQ ID NO: 1617 - DNA, 50 bp, Artificial sequence
  artificial DNA molecule for generation of DNA nanostructure
aaaagtttgattttttaacattatctgacctgaaagcgtaagccgcctgg

SEQ ID NO: 1618 - DNA, 43 bp, Artificial sequence
  artificial DNA molecule for generation of DNA nanostructure
gagccccccgcgtaaccaccacactactatggttgctttgacg

SEQ ID NO: 1619 - DNA, 47 bp, Artificial sequence
  artificial DNA molecule for generation of DNA nanostructure
gctggatttatttttgagcttgtgaactttttatcaccctgtcgtgc

SEQ ID NO: 1620 - DNA, 50 bp, Artificial sequence
  artificial DNA molecule for generation of DNA nanostructure
gcacgtataacgtgctttgaggcgaattattcattttttttaattacctg

SEQ ID NO: 1621 - DNA, 48 bp, Artificial sequence
  artificial DNA molecule for generation of DNA nanostructure
agcaaaagaagatgatgaaacaaacatacataaatcaatatatgtgag

SEQ ID NO: 1622 - DNA, 35 bp, Artificial sequence
  artificial DNA molecule for generation of DNA nanostructure
tcaacagttgtttttaaggacctcaaaaacaacta

SEQ ID NO: 1623 - DNA, 48 bp, Artificial sequence
  artificial DNA molecule for generation of DNA nanostructure
tgaataaccttgcttcaacgacggccagtgccgggtaacgtagcaaaa

SEQ ID NO: 1624 - DNA, 44 bp, Artificial sequence
  artificial DNA molecule for generation of DNA nanostructure
ggatttagaagtggagcacttatcaaacatctaaaacttgctga

SEQ ID NO: 1625 - DNA, 39 bp, Artificial sequence
  artificial DNA molecule for generation of DNA nanostructure
cctcatttttatcaaaatacgtgtctttaatccaacaga

SEQ ID NO: 1626 - DNA, 36 bp, Artificial sequence
  artificial DNA molecule for generation of DNA nanostructure
ttaattaattcattccgcaaatgttttaattaccct

SEQ ID NO: 1627 - DNA, 45 bp, Artificial sequence
  artificial DNA molecule for generation of DNA nanostructure
ttatccgctcattaccagacgaccgcaaggaatcggttgttgaga

SEQ ID NO: 1628 - DNA, 39 bp, Artificial sequence
  artificial DNA molecule for generation of DNA nanostructure
gataaaaatagatttagtttcgactctagagaaagctaa

SEQ ID NO: 1629 - DNA, 48 bp, Artificial sequence
  artificial DNA molecule for generation of DNA nanostructure
aacatacgagccggaattcctgtgcaatataatcctgacattggcaga

SEQ ID NO: 1630 - DNA, 39 bp, Artificial sequence
  artificial DNA molecule for generation of DNA nanostructure
ttgggttagaacctacataaagaaattttttgcgtagat

SEQ ID NO: 1631 - DNA, 47 bp, Artificial sequence
  artificial DNA molecule for generation of DNA nanostructure
catatcaaaattattaagttttttaatggaaacagtcaagaaaacaa

SEQ ID NO: 1632 - DNA, 38 bp, Artificial sequence
  artificial DNA molecule for generation of DNA nanostructure
atgatggatcatcattccacaccggaacaaatctacgt

SEQ ID NO: 1633 - DNA, 38 bp, Artificial sequence
  artificial DNA molecule for generation of DNA nanostructure
gcgggagaagccttcctcatatgtaagagcatcagttg

SEQ ID NO: 1634 - DNA, 45 bp, Artificial sequence
  artificial DNA molecule for generation of DNA nanostructure
acagtacctttctcaaactatttttcggccaattagtaataacat

SEQ ID NO: 1635 - DNA, 33 bp, Artificial sequence
  artificial DNA molecule for generation of DNA nanostructure
tattaggcacagatttttaatattttgaaggtt

SEQ ID NO: 1636 - DNA, 41 bp, Artificial sequence
  artificial DNA molecule for generation of DNA nanostructure
cggaacaaatgtaaagcctggggccttttttggcctaaagg

SEQ ID NO: 1637 - DNA, 38 bp, Artificial sequence
  artificial DNA molecule for generation of DNA nanostructure
cagaaggaaattgaggccattaaaacagcaaatgaaaa

SEQ ID NO: 1638 - DNA, 48 bp, Artificial sequence
  artificial DNA molecule for generation of DNA nanostructure
gcggaattcaattcattgaaattgggtaccgagctcgaataacaattt

SEQ ID NO: 1639 - DNA, 49 bp, Artificial sequence
  artificial DNA molecule for generation of DNA nanostructure
gatctacccacgctgagagccagatatacgcctcagagcatgatccccg

SEQ ID NO: 1640 - DNA, 42 bp, Artificial sequence
  artificial DNA molecule for generation of DNA nanostructure
ccgaacgaactttttaccaccctaatttttacatctgaatgg

SEQ ID NO: 1641 - DNA, 40 bp, Artificial sequence
  artificial DNA molecule for generation of DNA nanostructure
ctgcaaggcgattaagtttgcacgtactgcaacattaagc

SEQ ID NO: 1642 - DNA, 45 bp, Artificial sequence
  artificial DNA molecule for generation of DNA nanostructure
taccaaaaaggcaaggccattaggttgtaatgtaaatcgtcgcta

SEQ ID NO: 1643 - DNA, 47 bp, Artificial sequence
  artificial DNA molecule for generation of DNA nanostructure
tggattaatgaggagcgggcgctatttttggcgctgtttttgtagca

SEQ ID NO: 1644 - DNA, 41 bp, Artificial sequence
  artificial DNA molecule for generation of DNA nanostructure
aataaattccatttgaattacccttgcatgcctgcaggtga

SEQ ID NO: 1645 - DNA, 50 bp, Artificial sequence
  artificial DNA molecule for generation of DNA nanostructure
ctgtataacagaggtgaggtttttggtcagtattaacaccgcaaacagaa

SEQ ID NO: 1646 - DNA, 48 bp, Artificial sequence
  artificial DNA molecule for generation of DNA nanostructure
tgaataatggaagctggtaatatttttccagaacaatattctcaatcg

SEQ ID NO: 1647 - DNA, 48 bp, Artificial sequence
  artificial DNA molecule for generation of DNA nanostructure
aaatcagctcatttttataatacattttgttaatatttaaccagtttg

SEQ ID NO: 1648 - DNA, 42 bp, Artificial sequence
  artificial DNA molecule for generation of DNA nanostructure
attatcagatcccatcaatatgatattcaactttttgttcta

SEQ ID NO: 1649 - DNA, 39 bp, Artificial sequence
  artificial DNA molecule for generation of DNA nanostructure
tcgatgaagggttcaggctgcgcttaataaattgtgtcg

SEQ ID NO: 1650 - DNA, 48 bp, Artificial sequence
  artificial DNA molecule for generation of DNA nanostructure
ctcagagcaacagtgccaggagtgagggttgaaccgtactcaggaggt

SEQ ID NO: 1651 - DNA, 42 bp, Artificial sequence
  artificial DNA molecule for generation of DNA nanostructure
ttaagaggctgagactccccgtcgagtactggtacctaattt

SEQ ID NO: 1652 - DNA, 44 bp, Artificial sequence
  artificial DNA molecule for generation of DNA nanostructure
ataatgctgtagctcaagattaagtcatttggtttttgcgcgag

SEQ ID NO: 1653 - DNA, 47 bp, Artificial sequence
  artificial DNA molecule for generation of DNA nanostructure
caaagaatccagggttttcccagtcactcaattctttttactaatag

SEQ ID NO: 1654 - DNA, 40 bp, Artificial sequence
  artificial DNA molecule for generation of DNA nanostructure
aggattagctaaaacaaaacgaaagaggcaaaacgccagc

SEQ ID NO: 1655 - DNA, 49 bp, Artificial sequence
  artificial DNA molecule for generation of DNA nanostructure
gggaagtagcattaacatctggtgctaagggaaccgaaaagtttaattg

SEQ ID NO: 1656 - DNA, 47 bp, Artificial sequence
  artificial DNA molecule for generation of DNA nanostructure
ataagtttgtaagcgttcagagccgccaccaaagacaaagtacaacg

SEQ ID NO: 1657 - DNA, 38 bp, Artificial sequence
  artificial DNA molecule for generation of DNA nanostructure
cgccattcgccatttcttagccgagaccaggtaacgtc

SEQ ID NO: 1658 - DNA, 49 bp, Artificial sequence
  artificial DNA molecule for generation of DNA nanostructure
aaccaagtaccgcaacaatgatattttgccaaaataacggaaattattc

SEQ ID NO: 1659 - DNA, 47 bp, Artificial sequence
  artificial DNA molecule for generation of DNA nanostructure
tcaagagaggtcagtggaaacaaagaacgcgagaaaactttttcaaa

SEQ ID NO: 1660 - DNA, 48 bp, Artificial sequence
  artificial DNA molecule for generation of DNA nanostructure
cagaaaacaaagaggaaatcttgacgtaaccgcaaacggcggattgac

SEQ ID NO: 1661 - DNA, 46 bp, Artificial sequence
  artificial DNA molecule for generation of DNA nanostructure
gtgaaaggctatgcctgagattttttctgagggtatttttctattt

SEQ ID NO: 1662 - DNA, 48 bp, Artificial sequence
  artificial DNA molecule for generation of DNA nanostructure
gatcgcaccggtgtacgaacgaggtgcaaagcgcagtctcgaggttga

SEQ ID NO: 1663 - DNA, 50 bp, Artificial sequence
  artificial DNA molecule for generation of DNA nanostructure
caaaaatcagagtacccccgaaagacttttttcaaaccagacctacggtg

SEQ ID NO: 1664 - DNA, 48 bp, Artificial sequence
  artificial DNA molecule for generation of DNA nanostructure
gccaccctaccaggcggatactagcatgtcaatcatatgtaccccaat

SEQ ID NO: 1665 - DNA, 48 bp, Artificial sequence
  artificial DNA molecule for generation of DNA nanostructure
aaaaattttaaacagttgtcattttcgcagacgctacctttaactgtt

SEQ ID NO: 1666 - DNA, 45 bp, Artificial sequence
  artificial DNA molecule for generation of DNA nanostructure
tcccaatcagataagagcaagaactcatcgaacgcgaggcgtttt

SEQ ID NO: 1667 - DNA, 48 bp, Artificial sequence
  artificial DNA molecule for generation of DNA nanostructure
gtttagctatacaaaatcataggttgctgaatctccttttgataagag

SEQ ID NO: 1668 - DNA, 45 bp, Artificial sequence
  artificial DNA molecule for generation of DNA nanostructure
gagaataatcttaccaacgcatagacgacaggagtaacaattaaa

SEQ ID NO: 1669 - DNA, 38 bp, Artificial sequence
  artificial DNA molecule for generation of DNA nanostructure
caagcgcccttgagtcaccaccccatacatggcttttg

SEQ ID NO: 1670 - DNA, 38 bp, Artificial sequence
  artificial DNA molecule for generation of DNA nanostructure
tagactattttttttagtcagaagcaatagtaaaatgt

SEQ ID NO: 1671 - DNA, 48 bp, Artificial sequence
  artificial DNA molecule for generation of DNA nanostructure
ttgaatccgagaaacatcagtgaataaggcttcgtgggaatgcatctg

SEQ ID NO: 1672 - DNA, 50 bp, Artificial sequence
  artificial DNA molecule for generation of DNA nanostructure
gagatttagaatacagattagcgcggtaatcgtaaactaaagttttgtcg

SEQ ID NO: 1673 - DNA, 50 bp, Artificial sequence
  artificial DNA molecule for generation of DNA nanostructure
tttttattaaattttcaggtcaccagccaccctcttagtaccttccagag

SEQ ID NO: 1674 - DNA, 46 bp, Artificial sequence
  artificial DNA molecule for generation of DNA nanostructure
ttacaaacaatgtgtaggttttttaagattcaaacgttaatatttg

SEQ ID NO: 1675 - DNA, 51 bp, Artificial sequence
  artificial DNA molecule for generation of DNA nanostructure
ccaaaatagcgagagggaggcataattacgttgttttttgtagattacttt

SEQ ID NO: 1676 - DNA, 48 bp, Artificial sequence
  artificial DNA molecule for generation of DNA nanostructure
tagaaggcatgtgagccagaaccgtacacaggaagattgtaggaacgc

SEQ ID NO: 1677 - DNA, 49 bp, Artificial sequence
  artificial DNA molecule for generation of DNA nanostructure
tgagatggtttaatttcaacttttttttatcattgtgaattaccttatg

SEQ ID NO: 1678 - DNA, 33 bp, Artificial sequence
  artificial DNA molecule for generation of DNA nanostructure
aggttgggtagggcgatcggtgcggggggatgt

SEQ ID NO: 1679 - DNA, 48 bp, Artificial sequence
  artificial DNA molecule for generation of DNA nanostructure
atagtgaatttattttacgctgagaagagtcattatataaagcttaat

SEQ ID NO: 1680 - DNA, 39 bp, Artificial sequence
  artificial DNA molecule for generation of DNA nanostructure
ataagcaaaaattcgcacccgtcggattctccccaatag

SEQ ID NO: 1681 - DNA, 48 bp, Artificial sequence
  artificial DNA molecule for generation of DNA nanostructure
attacccaagattaagaggctgaccaactttggagaatgaaatattca

SEQ ID NO: 1682 - DNA, 48 bp, Artificial sequence
  artificial DNA molecule for generation of DNA nanostructure
caagaaccctgctcatccagaacgagtagtaaattgggctctgcggaa

SEQ ID NO: 1683 - DNA, 46 bp, Artificial sequence
  artificial DNA molecule for generation of DNA nanostructure
tcaagagtcagatgaatccagccaaggcaaaggccggaggagcaaa

SEQ ID NO: 1684 - DNA, 47 bp, Artificial sequence
  artificial DNA molecule for generation of DNA nanostructure
aaatgctgatgcaaatccaatcgcgaaccaccaaatccgcgacccgg

SEQ ID NO: 1685 - DNA, 48 bp, Artificial sequence
  artificial DNA molecule for generation of DNA nanostructure
ggctggctcaagcaaaaggaatcattaccgcggccctgacccctcaaa

SEQ ID NO: 1686 - DNA, 48 bp, Artificial sequence
  artificial DNA molecule for generation of DNA nanostructure
tgggaatcctcagaaccgccacctatattttgaacctattatttatac

SEQ ID NO: 1687 - DNA, 47 bp, Artificial sequence
  artificial DNA molecule for generation of DNA nanostructure
caagagaatggcgaaaggcctcttcgctattgtatcatcgcctgacc

SEQ ID NO: 1688 - DNA, 39 bp, Artificial sequence
  artificial DNA molecule for generation of DNA nanostructure
gtaatcctttttataaatcatacacattatgcgaacgag

SEQ ID NO: 1689 - DNA, 46 bp, Artificial sequence
  artificial DNA molecule for generation of DNA nanostructure
attgtaaagctgataaattggttgataatcagtcaggaaaggggac

SEQ ID NO: 1690 - DNA, 38 bp, Artificial sequence
  artificial DNA molecule for generation of DNA nanostructure
agggtgagtttttaaggccggatttagaactatttcaa

SEQ ID NO: 1691 - DNA, 48 bp, Artificial sequence
  artificial DNA molecule for generation of DNA nanostructure
aatgcagaaatcaacgtaacaaagggatattctcgtcataccataaat

SEQ ID NO: 1692 - DNA, 48 bp, Artificial sequence
  artificial DNA molecule for generation of DNA nanostructure
ctgagagagtcaatcacggaaaccgctttccggcaccgctgggcgcat

SEQ ID NO: 1693 - DNA, 49 bp, Artificial sequence
  artificial DNA molecule for generation of DNA nanostructure
agcgaaccttagttgcaatagcaaaatattgaacagccatatggccatt

SEQ ID NO: 1694 - DNA, 40 bp, Artificial sequence
  artificial DNA molecule for generation of DNA nanostructure
acatgttttaaatattttttcaactaaagggaagcaaact

SEQ ID NO: 1695 - DNA, 50 bp, Artificial sequence
  artificial DNA molecule for generation of DNA nanostructure
tctggaagtttttcccttagaatccttgaaatttttcatagcgatagctt

SEQ ID NO: 1696 - DNA, 49 bp, Artificial sequence
  artificial DNA molecule for generation of DNA nanostructure
caacaggtcaggattagaggtctttaccctgactggatagcgtccaata

SEQ ID NO: 1697 - DNA, 39 bp, Artificial sequence
  artificial DNA molecule for generation of DNA nanostructure
ccgttccataatgctccatgttatgctcagttatcggcc

SEQ ID NO: 1698 - DNA, 42 bp, Artificial sequence
  artificial DNA molecule for generation of DNA nanostructure
aaatcataaatagattagatttttccgtcaatagtaaccaat

SEQ ID NO: 1699 - DNA, 47 bp, Artificial sequence
  artificial DNA molecule for generation of DNA nanostructure
cgtaatggtttttataggtcttaaatgcaatgcctgagtaaagattc

SEQ ID NO: 1700 - DNA, 41 bp, Artificial sequence
  artificial DNA molecule for generation of DNA nanostructure
aacaaccatcgccccctcagagccaccaccctcttatccgg

SEQ ID NO: 1701 - DNA, 40 bp, Artificial sequence
  artificial DNA molecule for generation of DNA nanostructure
attatttagccagttaacccagctcacacgcataaccgat

SEQ ID NO: 1702 - DNA, 44 bp, Artificial sequence
  artificial DNA molecule for generation of DNA nanostructure
gggaaggtatagctatcttaccgaaattccaagaacgggtatta

SEQ ID NO: 1703 - DNA, 40 bp, Artificial sequence
  artificial DNA molecule for generation of DNA nanostructure
aaaagccccaaaaaaactacaacgagcgtaacgataagtg

SEQ ID NO: 1704 - DNA, 48 bp, Artificial sequence
  artificial DNA molecule for generation of DNA nanostructure
agaaccgcacaatttttattctaagagaacaagcaagccgtttttatt

SEQ ID NO: 1705 - DNA, 47 bp, Artificial sequence
  artificial DNA molecule for generation of DNA nanostructure
tgagcgctaatatcaggaattaactttacagattcatcgttcagata

SEQ ID NO: 1706 - DNA, 43 bp, Artificial sequence
  artificial DNA molecule for generation of DNA nanostructure
tgtccagaaagtttgtcacaatcacttattacagcccccttat

SEQ ID NO: 1707 - DNA, 46 bp, Artificial sequence
  artificial DNA molecule for generation of DNA nanostructure
ttaaaggtgagagaatataaaggtttaccaaagttaccaataccca

SEQ ID NO: 1708 - DNA, 40 bp, Artificial sequence
  artificial DNA molecule for generation of DNA nanostructure
aaagaactggcatgataataacggagaaggaaatcctaat

SEQ ID NO: 1709 - DNA, 47 bp, Artificial sequence
  artificial DNA molecule for generation of DNA nanostructure
ccagtaatgaatagccaccgagtacggtacgcgcgggagcgtcagac

SEQ ID NO: 1710 - DNA, 40 bp, Artificial sequence
  artificial DNA molecule for generation of DNA nanostructure
tgtagcgcgttttcatgcctttagctaaacagtgctttga

SEQ ID NO: 1711 - DNA, 32 bp, Artificial sequence
  artificial DNA molecule for generation of DNA nanostructure
ccgaaatcaagggcgagtttggaaatacatac

SEQ ID NO: 1712 - DNA, 43 bp, Artificial sequence
  artificial DNA molecule for generation of DNA nanostructure
tagcgttttagcgacagaatcaagtttcggcatttggatttta

SEQ ID NO: 1713 - DNA, 49 bp, Artificial sequence
  artificial DNA molecule for generation of DNA nanostructure
ataaaggtggcaacatcgtagaaacaagagtcgacaggaaaaaccatat

SEQ ID NO: 1714 - DNA, 47 bp, Artificial sequence
  artificial DNA molecule for generation of DNA nanostructure
caaaatacataatttttgccaaaaagggggtaaagcggaaaagaagt

SEQ ID NO: 1715 - DNA, 46 bp, Artificial sequence
  artificial DNA molecule for generation of DNA nanostructure
attcccaattctgcgagcttcaaagcgaatatcgcggtcaataacc

SEQ ID NO: 1716 - DNA, 43 bp, Artificial sequence
  artificial DNA molecule for generation of DNA nanostructure
aagggaagaaagcgaagtcatcggaacggtcgaggtgccgtaa

SEQ ID NO: 1717 - DNA, 30 bp, Artificial sequence
  artificial DNA molecule for generation of DNA nanostructure
tttgccagggaattaccttttgcattgcat

SEQ ID NO: 1718 - DNA, 38 bp, Artificial sequence
  artificial DNA molecule for generation of DNA nanostructure
ctgaaaaggtggcagacatacatttcatataacagttg

SEQ ID NO: 1719 - DNA, 40 bp, Artificial sequence
  artificial DNA molecule for generation of DNA nanostructure
gccgctacttacattttcgtaatctttattgtttggatta

SEQ ID NO: 1720 - DNA, 39 bp, Artificial sequence
  artificial DNA molecule for generation of DNA nanostructure
tacttctttgattaaagggcgcgccgccgcgcttaatgc

SEQ ID NO: 1721 - DNA, 40 bp, Artificial sequence
  artificial DNA molecule for generation of DNA nanostructure
agcactaaatagctgtgcataaaggaaaccacttaatttt

SEQ ID NO: 1722 - DNA, 43 bp, Artificial sequence
  artificial DNA molecule for generation of DNA nanostructure
gcccaataggaagcgcattagacgggaagagataagaaacgat

SEQ ID NO: 1723 - DNA, 43 bp, Artificial sequence
  artificial DNA molecule for generation of DNA nanostructure
gaccttcatgcgaaaatagcagcctgaacaccctgaacaaagt

SEQ ID NO: 1724 - DNA, 37 bp, Artificial sequence
  artificial DNA molecule for generation of DNA nanostructure
tgatattcacaaatggcttagctatatgttccggctt

SEQ ID NO: 1725 - DNA, 32 bp, Artificial sequence
  artificial DNA molecule for generation of DNA nanostructure
cagagggtaatggcaggtcagacgattggcct

SEQ ID NO: 1726 - DNA, 44 bp, Artificial sequence
  artificial DNA molecule for generation of DNA nanostructure
ccagcattgacagtgaatttatttttgttcgctaacgagcgtct

SEQ ID NO: 1727 - DNA, 43 bp, Artificial sequence
  artificial DNA molecule for generation of DNA nanostructure
atcctgaacataaaaaccaaataacccacaagaattgagttaa

SEQ ID NO: 1728 - DNA, 45 bp, Artificial sequence
  artificial DNA molecule for generation of DNA nanostructure
aaagccagaatggggacaaataaatcctcattaccagagccgccg

SEQ ID NO: 1729 - DNA, 46 bp, Artificial sequence
  artificial DNA molecule for generation of DNA nanostructure
gcaaaatcccttagcgggcaagtgtagcggtcacgttttttgcgcg

SEQ ID NO: 1730 - DNA, 48 bp, Artificial sequence
  artificial DNA molecule for generation of DNA nanostructure
cagcaccgtgccggacgggcgaaaaaccggttgatacatagccactac

SEQ ID NO: 1731 - DNA, 40 bp, Artificial sequence
  artificial DNA molecule for generation of DNA nanostructure
gcggaatcagagggggccaacaggagagcttaattgctga

SEQ ID NO: 1732 - DNA, 51 bp, Artificial sequence
  artificial DNA molecule for generation of DNA nanostructure
agcaaacttaatagtatcgctgaggcttgcgcccgatagtaagctatcagg

SEQ ID NO: 1733 - DNA, 48 bp, Artificial sequence
  artificial DNA molecule for generation of DNA nanostructure
tattcattgaattttttcccctgctgctctttttttcagttcatcaag

SEQ ID NO: 1734 - DNA, 41 bp, Artificial sequence
  artificial DNA molecule for generation of DNA nanostructure
ggtctggttcactattacaaatcaagttttttggcagttgg

SEQ ID NO: 1735 - DNA, 40 bp, Artificial sequence
  artificial DNA molecule for generation of DNA nanostructure
ataggctggctgacctgaataaggcttgcgccgtcataaa

SEQ ID NO: 1736 - DNA, 48 bp, Artificial sequence
  artificial DNA molecule for generation of DNA nanostructure
cgtatatcaaaattatgtagattttcaggtttaatttttgtcagatga

SEQ ID NO: 1737 - DNA, 48 bp, Artificial sequence
  artificial DNA molecule for generation of DNA nanostructure
tgacgagcacgtataacgatgctgattgccccgcggttgtgtacatcg

SEQ ID NO: 1738 - DNA, 46 bp, Artificial sequence
  artificial DNA molecule for generation of DNA nanostructure
aaccgatctgtagctagcgaacccataaccctcaatcaatatctgg

SEQ ID NO: 1739 - DNA, 46 bp, Artificial sequence
  artificial DNA molecule for generation of DNA nanostructure
tagatacatttcgctaacagttggtgtctggaagtttcgaattgcg

SEQ ID NO: 1740 - DNA, 46 bp, Artificial sequence
  artificial DNA molecule for generation of DNA nanostructure
gcccgaacgttatcaactcatggatttttatacctacacaattcga

SEQ ID NO: 1741 - DNA, 48 bp, Artificial sequence
  artificial DNA molecule for generation of DNA nanostructure
tgatggtgtaaccaccacacgttccggcaaacccatcaccaagaacgt

SEQ ID NO: 1742 - DNA, 47 bp, Artificial sequence
  artificial DNA molecule for generation of DNA nanostructure
gatagcgtgagtaacaggattgaccgtaatgggataggtgaactaac

SEQ ID NO: 1743 - DNA, 40 bp, Artificial sequence
  artificial DNA molecule for generation of DNA nanostructure
ccaatactggaacaacttttgcaaaagaagtaggcaggga

SEQ ID NO: 1744 - DNA, 44 bp, Artificial sequence
  artificial DNA molecule for generation of DNA nanostructure
aaacgttgttaaatcagctcattttttttttaacaaagaattag

SEQ ID NO: 1745 - DNA, 55 bp, Artificial sequence
  artificial DNA molecule for generation of DNA nanostructure
agaatgaccattgtagatgggcgcaaaaaaccagcagattaccaagcgcgaaaca

SEQ ID NO: 1746 - DNA, 40 bp, Artificial sequence
  artificial DNA molecule for generation of DNA nanostructure
tctcgtcgttagtgattaaaaaaagccgcacacgtgggaa

SEQ ID NO: 1747 - DNA, 51 bp, Artificial sequence
  artificial DNA molecule for generation of DNA nanostructure
gccgcgcttaattttttcgccgctacaggaaacagcggatcaaacttaaat

SEQ ID NO: 1748 - DNA, 47 bp, Artificial sequence
  artificial DNA molecule for generation of DNA nanostructure
ttttttcggttagaacctaccgctttcctcgttcacgcaatggtgct

SEQ ID NO: 1749 - DNA, 48 bp, Artificial sequence
  artificial DNA molecule for generation of DNA nanostructure
taacgatctaaagttttgtcgtctttccagactgacccccgcttgata

SEQ ID NO: 1750 - DNA, 47 bp, Artificial sequence
  artificial DNA molecule for generation of DNA nanostructure
acgccatcaaaaataaaaataaagcttgctgaaataataatggaagg

SEQ ID NO: 1751 - DNA, 48 bp, Artificial sequence
  artificial DNA molecule for generation of DNA nanostructure
caataggactgtagccagctttcatcaaccaggattaagaggaagccc

SEQ ID NO: 1752 - DNA, 46 bp, Artificial sequence
  artificial DNA molecule for generation of DNA nanostructure
gttccgatttttaatcgtggtttgtttttcccagcagcgtgcctgt

SEQ ID NO: 1753 - DNA, 48 bp, Artificial sequence
  artificial DNA molecule for generation of DNA nanostructure
acataaaatacgtgaagcggtccgcgtcagcgattcctgattgtttgg

SEQ ID NO: 1754 - DNA, 50 bp, Artificial sequence
  artificial DNA molecule for generation of DNA nanostructure
tctgctcatttgccgccagggtcgaggtgccgtaaagtttttactaaatc

SEQ ID NO: 1755 - DNA, 50 bp, Artificial sequence
  artificial DNA molecule for generation of DNA nanostructure
ggaacccttagcccgagatagggtttttttagtgttgttccagtttggaa

SEQ ID NO: 1756 - DNA, 36 bp, Artificial sequence
  artificial DNA molecule for generation of DNA nanostructure
ccgaacgaatctaaagcatcacaaattgcttgcacg

SEQ ID NO: 1757 - DNA, 48 bp, Artificial sequence
  artificial DNA molecule for generation of DNA nanostructure
tcagttataattatacttctgtcgacggaacgtcggtggctccggttt

SEQ ID NO: 1758 - DNA, 52 bp, Artificial sequence
  artificial DNA molecule for generation of DNA nanostructure
gataaaacagagatgcgcgaactgttttttagccctcgttgtagttgcggaa

SEQ ID NO: 1759 - DNA, 47 bp, Artificial sequence
  artificial DNA molecule for generation of DNA nanostructure
gagtctgtccatagaatcagtttttgcgggagctaaacaggaggccg

SEQ ID NO: 1760 - DNA, 40 bp, Artificial sequence
  artificial DNA molecule for generation of DNA nanostructure
aataaaaccacgttggaaatcaaaaatattaaatgtgagc

SEQ ID NO: 1761 - DNA, 39 bp, Artificial sequence
  artificial DNA molecule for generation of DNA nanostructure
aagattcactccggccagagctgtcaaatattggccttc

SEQ ID NO: 1762 - DNA, 48 bp, Artificial sequence
  artificial DNA molecule for generation of DNA nanostructure
ttgaaaggaattgaacctgtttagcaataaatagaccggagaaagact

SEQ ID NO: 1763 - DNA, 48 bp, Artificial sequence
  artificial DNA molecule for generation of DNA nanostructure
taaaacagggcggcctctggcagctcatctatcagggcgaacactatc

SEQ ID NO: 1764 - DNA, 44 bp, Artificial sequence
  artificial DNA molecule for generation of DNA nanostructure
tatttacattggcagattttttcaccagtcacacgagaaaaacg

SEQ ID NO: 1765 - DNA, 39 bp, Artificial sequence
  artificial DNA molecule for generation of DNA nanostructure
ggaataccagacacatcctcataagcttcaacctgatta

SEQ ID NO: 1766 - DNA, 48 bp, Artificial sequence
  artificial DNA molecule for generation of DNA nanostructure
ggactccagggtggttgcaagaatgaggtgtccaaagaaatttacaaa

SEQ ID NO: 1767 - DNA, 45 bp, Artificial sequence
  artificial DNA molecule for generation of DNA nanostructure
aattatccccacgcagaatagactttcaacagtttcagccgggcg

SEQ ID NO: 1768 - DNA, 48 bp, Artificial sequence
  artificial DNA molecule for generation of DNA nanostructure
ggattctcttcgcgtccgcgttttacctcaaatatcaacaggcaaggc

SEQ ID NO: 1769 - DNA, 48 bp, Artificial sequence
  artificial DNA molecule for generation of DNA nanostructure
agcgattagaacggtgtacagacctttcctgacgagaaactctacgtt

SEQ ID NO: 1770 - DNA, 45 bp, Artificial sequence
  artificial DNA molecule for generation of DNA nanostructure
ccaccagaaatggatgccattaaaaggcaaatcaacagtcagatg

SEQ ID NO: 1771 - DNA, 42 bp, Artificial sequence
  artificial DNA molecule for generation of DNA nanostructure
cttcgcgtggcgggccgttttttttcgtaatgggtaaaggtt

SEQ ID NO: 1772 - DNA, 47 bp, Artificial sequence
  artificial DNA molecule for generation of DNA nanostructure
ttttgacgctcaatcgtcgagcatttagtgaaggagcggatggcaat

SEQ ID NO: 1773 - DNA, 48 bp, Artificial sequence
  artificial DNA molecule for generation of DNA nanostructure
tgcaactatgcgccgaaataataaaatgaattttctgtatgggatttt

SEQ ID NO: 1774 - DNA, 39 bp, Artificial sequence
  artificial DNA molecule for generation of DNA nanostructure
ctaacaacttgaggatttagaaggcggagtgaaccagct

SEQ ID NO: 1775 - DNA, 40 bp, Artificial sequence
  artificial DNA molecule for generation of DNA nanostructure
tagagccgattccataaaatggtctttaaataatataatg

SEQ ID NO: 1776 - DNA, 45 bp, Artificial sequence
  artificial DNA molecule for generation of DNA nanostructure
gttaaagggtaacactcatcttgttagtattttttcacgttgaaa

SEQ ID NO: 1777 - DNA, 49 bp, Artificial sequence
  artificial DNA molecule for generation of DNA nanostructure
accgggggattaaattttttcctttcagaatgcccgtgagcagtgagct

SEQ ID NO: 1778 - DNA, 48 bp, Artificial sequence
  artificial DNA molecule for generation of DNA nanostructure
aacagctgattgccctgcccgctttccagtcgtgcggctgacggtcat

SEQ ID NO: 1779 - DNA, 48 bp, Artificial sequence
  artificial DNA molecule for generation of DNA nanostructure
gaaggcacttgaggacagcgaaaggctaaacaaaaggaacaactaaag

SEQ ID NO: 1780 - DNA, 48 bp, Artificial sequence
  artificial DNA molecule for generation of DNA nanostructure
gtaacattatcattcaatacttcttttttttattagtaatcgagtaaa

SEQ ID NO: 1781 - DNA, 39 bp, Artificial sequence
  artificial DNA molecule for generation of DNA nanostructure
tgagagccatttttcagcaaatgaaaaaccaccagcaga

SEQ ID NO: 1782 - DNA, 48 bp, Artificial sequence
  artificial DNA molecule for generation of DNA nanostructure
caactcgttttgtcattgcaggcggtatgagccgggtcactgttgccc

SEQ ID NO: 1783 - DNA, 49 bp, Artificial sequence
  artificial DNA molecule for generation of DNA nanostructure
ataaccctcgtttaccctaatgcagagatttatcgtcacctgcacgcat

SEQ ID NO: 1784 - DNA, 48 bp, Artificial sequence
  artificial DNA molecule for generation of DNA nanostructure
cagcatcagcgggctggtcgtgcccaccagtgagacgggccaagagtc

SEQ ID NO: 1785 - DNA, 48 bp, Artificial sequence
  artificial DNA molecule for generation of DNA nanostructure
acagcatcacaaccatcgccccatatcatatttaatacattaatagat

SEQ ID NO: 1786 - DNA, 40 bp, Artificial sequence
  artificial DNA molecule for generation of DNA nanostructure
tcaatagacaacatgtaataggaaggttatctaaaatatc

SEQ ID NO: 1787 - DNA, 48 bp, Artificial sequence
  artificial DNA molecule for generation of DNA nanostructure
cggccaactacggctggccaacggtcatcaatataataacaaaacatc

SEQ ID NO: 1788 - DNA, 48 bp, Artificial sequence
  artificial DNA molecule for generation of DNA nanostructure
agctgcattaatgaatcggttgcgctttcgcactcaatcctattagac

SEQ ID NO: 1789 - DNA, 48 bp, Artificial sequence
  artificial DNA molecule for generation of DNA nanostructure
ggaaacctccagcacggcgaaaatcctgtcagcagcaacctttctttt

SEQ ID NO: 1790 - DNA, 45 bp, Artificial sequence
  artificial DNA molecule for generation of DNA nanostructure
ctttgctgttgctttttctcacttcaccgtttttctggccctgag

SEQ ID NO: 1791 - DNA, 39 bp, Artificial sequence
  artificial DNA molecule for generation of DNA nanostructure
attagcggggttttgctattaagacctttttagcgggag

SEQ ID NO: 1792 - DNA, 48 bp, Artificial sequence
  artificial DNA molecule for generation of DNA nanostructure
acggagaaactgatttttcaactttgaaagaggaaacgagtagtaaat

SEQ ID NO: 1793 - DNA, 36 bp, Artificial sequence
  artificial DNA molecule for generation of DNA nanostructure
tccacagacagccctcttttttagttagcgaagtac

SEQ ID NO: 1794 - DNA, 36 bp, Artificial sequence
  artificial DNA molecule for generation of DNA nanostructure
aactacaacgccataaattgtttatcagtgacaaga

SEQ ID NO: 1795 - DNA, 47 bp, Artificial sequence
  artificial DNA molecule for generation of DNA nanostructure
caataaagcctcagaaaatttttaatattttgttaaaatcaaaagcg

SEQ ID NO: 1796 - DNA, 40 bp, Artificial sequence
  artificial DNA molecule for generation of DNA nanostructure
tgagtttcataggaacccatgtacttctagcttgaacggt

SEQ ID NO: 1797 - DNA, 39 bp, Artificial sequence
  artificial DNA molecule for generation of DNA nanostructure
atttaggcagaggcattttcgagccagtaataaattctg

SEQ ID NO: 1798 - DNA, 22 bp, Artificial sequence
  artificial DNA molecule for generation of DNA nanostructure
aatacttttctaaatcggttgt

SEQ ID NO: 1799 - DNA, 38 bp, Artificial sequence
  artificial DNA molecule for generation of DNA nanostructure
accaaaaacattaaggataaaaatttcattgtgatagc

SEQ ID NO: 1800 - DNA, 50 bp, Artificial sequence
  artificial DNA molecule for generation of DNA nanostructure
caaaattaagactaatagtagtttttagcattaacatcctatattttcat

SEQ ID NO: 1801 - DNA, 49 bp, Artificial sequence
  artificial DNA molecule for generation of DNA nanostructure
ggcctcagactgttgggaagggcgccattcaggctgcgcaagtaattgt

SEQ ID NO: 1802 - DNA, 40 bp, Artificial sequence
  artificial DNA molecule for generation of DNA nanostructure
agaaaggccggagacattattttgattgagggaacatata

SEQ ID NO: 1803 - DNA, 47 bp, Artificial sequence
  artificial DNA molecule for generation of DNA nanostructure
aaagggtgtatgatattcaaccgcgacaaaaaaccgccaccctcaga

SEQ ID NO: 1804 - DNA, 47 bp, Artificial sequence
  artificial DNA molecule for generation of DNA nanostructure
aacgagtagtaggtaaagattcaatgcctgaaatcgtaatgataatc

SEQ ID NO: 1805 - DNA, 40 bp, Artificial sequence
  artificial DNA molecule for generation of DNA nanostructure
aatcataagggaaccgtttgtatcatcgcctgtgtagcat

SEQ ID NO: 1806 - DNA, 50 bp, Artificial sequence
  artificial DNA molecule for generation of DNA nanostructure
cgaggcgcagacggtctcaactttgtaacaaacaaatgctttacagccag

SEQ ID NO: 1807 - DNA, 39 bp, Artificial sequence
  artificial DNA molecule for generation of DNA nanostructure
cctgaattttatttttttatcaaatttatccctttacag

SEQ ID NO: 1808 - DNA, 47 bp, Artificial sequence
  artificial DNA molecule for generation of DNA nanostructure
catgaaagttcgcattgcataaagagaaaagtaagcaataccggaaa

SEQ ID NO: 1809 - DNA, 40 bp, Artificial sequence
  artificial DNA molecule for generation of DNA nanostructure
gtgctgcattagaatcatagcagccaatccaaataacgga

SEQ ID NO: 1810 - DNA, 48 bp, Artificial sequence
  artificial DNA molecule for generation of DNA nanostructure
tccagacggtcaaatcaaggtggcagggaaggtaaatttttaaatgca

SEQ ID NO: 1811 - DNA, 51 bp, Artificial sequence
  artificial DNA molecule for generation of DNA nanostructure
aaaaggagcctttaattggctattttttttttgagatctccaacttaaaca

SEQ ID NO: 1812 - DNA, 49 bp, Artificial sequence
  artificial DNA molecule for generation of DNA nanostructure
agggcgacattcaaccgtcacaatcacaccacggaataagtacgacaat

SEQ ID NO: 1813 - DNA, 37 bp, Artificial sequence
  artificial DNA molecule for generation of DNA nanostructure
gtaatgtgaaaaggtggttagaaccctcatccccggt

SEQ ID NO: 1814 - DNA, 35 bp, Artificial sequence
  artificial DNA molecule for generation of DNA nanostructure
accaatcaaagccgttattacgcaatacccaaaag

SEQ ID NO: 1815 - DNA, 47 bp, Artificial sequence
  artificial DNA molecule for generation of DNA nanostructure
gggcttgagatggtttcattataccagtctttttggacgttgggaag

SEQ ID NO: 1816 - DNA, 40 bp, Artificial sequence
  artificial DNA molecule for generation of DNA nanostructure
ataattgacggaaattattcattaccattagcccgaggaa

SEQ ID NO: 1817 - DNA, 45 bp, Artificial sequence
  artificial DNA molecule for generation of DNA nanostructure
tggggttgataagcaaacaagcctcattttcaggcggtgtcgaaa

SEQ ID NO: 1818 - DNA, 39 bp, Artificial sequence
  artificial DNA molecule for generation of DNA nanostructure
ccattcgatcggtgcgggcctcttcgctattacgccagc

SEQ ID NO: 1819 - DNA, 31 bp, Artificial sequence
  artificial DNA molecule for generation of DNA nanostructure
attttcccaggcgatttgaacaaagtcagag

SEQ ID NO: 1820 - DNA, 39 bp, Artificial sequence
  artificial DNA molecule for generation of DNA nanostructure
ccttatcattccaagaacgggccatgtcaataccatcaa

SEQ ID NO: 1821 - DNA, 49 bp, Artificial sequence
  artificial DNA molecule for generation of DNA nanostructure
taccgccataagtatagcccggaattctggtgagcaaatatttacagaa

SEQ ID NO: 1822 - DNA, 51 bp, Artificial sequence
  artificial DNA molecule for generation of DNA nanostructure
tcattgcctttttgagagtctggagaggtcattttttttttcggatggctt

SEQ ID NO: 1823 - DNA, 47 bp, Artificial sequence
  artificial DNA molecule for generation of DNA nanostructure
accattaaaggtgaagcaaacgtaaagaaacctgtctttaaacaaca

SEQ ID NO: 1824 - DNA, 42 bp, Artificial sequence
  artificial DNA molecule for generation of DNA nanostructure
cttctgtaaatcgtcgctgtctgagagactacctccagctac

SEQ ID NO: 1825 - DNA, 36 bp, Artificial sequence
  artificial DNA molecule for generation of DNA nanostructure
agagggtatatgatagcaagcccagtcaccagtaca

SEQ ID NO: 1826 - DNA, 43 bp, Artificial sequence
  artificial DNA molecule for generation of DNA nanostructure
atcgtaaccgttttttcatctgccagtttgaggctggctaatt

SEQ ID NO: 1827 - DNA, 47 bp, Artificial sequence
  artificial DNA molecule for generation of DNA nanostructure
aactagcaccctcagggtaaagtagagaatataaagtaccgtaacac

SEQ ID NO: 1828 - DNA, 48 bp, Artificial sequence
  artificial DNA molecule for generation of DNA nanostructure
caccaatgtagcaataacgcaataataagaaactcatcgagaacaagc

SEQ ID NO: 1829 - DNA, 49 bp, Artificial sequence
  artificial DNA molecule for generation of DNA nanostructure
aagcctgccggaaacgtacctattactcctcaagagtgagcgctaatat

SEQ ID NO: 1830 - DNA, 39 bp, Artificial sequence
  artificial DNA molecule for generation of DNA nanostructure
tgtttatcgaatcgccatatttaacaacgcccccaatag

SEQ ID NO: 1831 - DNA, 44 bp, Artificial sequence
  artificial DNA molecule for generation of DNA nanostructure
agatctacaaaggtacgattcccatttttttctgcgaatgccgg

SEQ ID NO: 1832 - DNA, 41 bp, Artificial sequence
  artificial DNA molecule for generation of DNA nanostructure
catacatagaaggaaaaagttatttcaacgcatgaccctgt

SEQ ID NO: 1833 - DNA, 31 bp, Artificial sequence
  artificial DNA molecule for generation of DNA nanostructure
ccaccacaacgcgccatgtagaacaagcaaa

SEQ ID NO: 1834 - DNA, 38 bp, Artificial sequence
  artificial DNA molecule for generation of DNA nanostructure
cgaacaaggttgataccctcagaaccgtattaaaccaa

SEQ ID NO: 1835 - DNA, 37 bp, Artificial sequence
  artificial DNA molecule for generation of DNA nanostructure
gctatcttacgtcaagattaggtggcgaaagggggat

SEQ ID NO: 1836 - DNA, 47 bp, Artificial sequence
  artificial DNA molecule for generation of DNA nanostructure
aggtttagagaaaagccccaacttcgcgagctgatttagtttgacca

SEQ ID NO: 1837 - DNA, 42 bp, Artificial sequence
  artificial DNA molecule for generation of DNA nanostructure
gtaatctcttgctttcgtttttggtgaatttaaaaaaggctc

SEQ ID NO: 1838 - DNA, 37 bp, Artificial sequence
  artificial DNA molecule for generation of DNA nanostructure
ccctgactattatgaagatcgcactcaacacagtatc

SEQ ID NO: 1839 - DNA, 44 bp, Artificial sequence
  artificial DNA molecule for generation of DNA nanostructure
ctttccggcaccgctaggtgtactcaaacaggaagatcaattct

SEQ ID NO: 1840 - DNA, 48 bp, Artificial sequence
  artificial DNA molecule for generation of DNA nanostructure
tcaggatttttttgagagtacccggattgtttttatcaaaaagtcttt

SEQ ID NO: 1841 - DNA, 49 bp, Artificial sequence
  artificial DNA molecule for generation of DNA nanostructure
ccaggcgtaccaggcggataagttaaccgaagcggctgagattctgaaa

SEQ ID NO: 1842 - DNA, 30 bp, Artificial sequence
  artificial DNA molecule for generation of DNA nanostructure
ataatcgggcaaccagaaccaccaccagag

SEQ ID NO: 1843 - DNA, 47 bp, Artificial sequence
  artificial DNA molecule for generation of DNA nanostructure
gggttttcctttttagtcacgacgttgtaatgtgagtgaataacctt

SEQ ID NO: 1844 - DNA, 61 bp, Artificial sequence
  artificial DNA molecule for generation of DNA nanostructure
cgccgccagcagattaagactttttccttcttaccaagccatattaatcatagattaatta

SEQ ID NO: 1845 - DNA, 54 bp, Artificial sequence
  artificial DNA molecule for generation of DNA nanostructure
actggcattaataagtttttgcaagaaacagagagatttttaacccacaagaat

SEQ ID NO: 1846 - DNA, 35 bp, Artificial sequence
  artificial DNA molecule for generation of DNA nanostructure
aaagccaacgctcatttttcagtagggcttatccg

SEQ ID NO: 1847 - DNA, 44 bp, Artificial sequence
  artificial DNA molecule for generation of DNA nanostructure
gtatgttattatcactttttgtcaccgacttgcgccaaagacaa

SEQ ID NO: 1848 - DNA, 47 bp, Artificial sequence
  artificial DNA molecule for generation of DNA nanostructure
agagttgcaactcacattaattgccgtcataaacatcccttacactg

SEQ ID NO: 1849 - DNA, 49 bp, Artificial sequence
  artificial DNA molecule for generation of DNA nanostructure
caatgaaaaaactttttatcgatagccagcaaaatcatttttcagtagc

SEQ ID NO: 1850 - DNA, 45 bp, Artificial sequence
  artificial DNA molecule for generation of DNA nanostructure
tgccacgcatatacagacggattcgcctgattgcttttggttgct

SEQ ID NO: 1851 - DNA, 45 bp, Artificial sequence
  artificial DNA molecule for generation of DNA nanostructure
ttagagcagcaccgtaatcagtcgtataaatcagtgccttgagta

SEQ ID NO: 1852 - DNA, 49 bp, Artificial sequence
  artificial DNA molecule for generation of DNA nanostructure
ctttagcgaaacatggcttttgacgacaaaattctgacctaaatcatgg

SEQ ID NO: 1853 - DNA, 46 bp, Artificial sequence
  artificial DNA molecule for generation of DNA nanostructure
tcatagccgagccatttgggtcagactgtagcaatcctcgccttga

SEQ ID NO: 1854 - DNA, 48 bp, Artificial sequence
  artificial DNA molecule for generation of DNA nanostructure
attttcgggacgattgattaaagcttcatcttaattacatttaaccaa

SEQ ID NO: 1855 - DNA, 35 bp, Artificial sequence
  artificial DNA molecule for generation of DNA nanostructure
aaaagggacattctttcgtggcacagacaatattt

SEQ ID NO: 1856 - DNA, 48 bp, Artificial sequence
  artificial DNA molecule for generation of DNA nanostructure
ccagtaatttgctggtgtagaagatgtttcctaagggaagaaaaacat

SEQ ID NO: 1857 - DNA, 39 bp, Artificial sequence
  artificial DNA molecule for generation of DNA nanostructure
tattaccgccagccatctgcgcgcgtaccgagctcgaat

SEQ ID NO: 1858 - DNA, 38 bp, Artificial sequence
  artificial DNA molecule for generation of DNA nanostructure
aacggggcagttaatgcccccttttttcctatttcgga

SEQ ID NO: 1859 - DNA, 51 bp, Artificial sequence
  artificial DNA molecule for generation of DNA nanostructure
gccgccaagaatagaaaattttttcatatggtcagaaccgccaccctcaga

SEQ ID NO: 1860 - DNA, 44 bp, Artificial sequence
  artificial DNA molecule for generation of DNA nanostructure
aagcgtaagaatatcatcggcccatctttaccggaaccgcctcc

SEQ ID NO: 1861 - DNA, 32 bp, Artificial sequence
  artificial DNA molecule for generation of DNA nanostructure
ttgaatggagagatagaacccttctgacctga

SEQ ID NO: 1862 - DNA, 48 bp, Artificial sequence
  artificial DNA molecule for generation of DNA nanostructure
cttttacacagtgccagcgacagggtatgatacaggagaatcctgagc

SEQ ID NO: 1863 - DNA, 39 bp, Artificial sequence
  artificial DNA molecule for generation of DNA nanostructure
agagaataacatatttttaaacagggaagcgcaccacgg

SEQ ID NO: 1864 - DNA, 48 bp, Artificial sequence
  artificial DNA molecule for generation of DNA nanostructure
caaagaacgcgagattaactatattacataaatcaatataaacgacgg

SEQ ID NO: 1865 - DNA, 47 bp, Artificial sequence
  artificial DNA molecule for generation of DNA nanostructure
caagaaaccagaatcaacaaatagcgtggccaacctattagtcttta

SEQ ID NO: 1866 - DNA, 40 bp, Artificial sequence
  artificial DNA molecule for generation of DNA nanostructure
aacgtggcgaggccacaacatcacttgcctgaaatatcca

SEQ ID NO: 1867 - DNA, 40 bp, Artificial sequence
  artificial DNA molecule for generation of DNA nanostructure
ccggaaactgtactggtaatagttaagcccaaatttaccg

SEQ ID NO: 1868 - DNA, 49 bp, Artificial sequence
  artificial DNA molecule for generation of DNA nanostructure
ataaacacgctaacgtttttgcgtcttccatcctattttttttacgagc

SEQ ID NO: 1869 - DNA, 45 bp, Artificial sequence
  artificial DNA molecule for generation of DNA nanostructure
gtatttattttttttgcactttttttttacctccggcttaggttg

SEQ ID NO: 1870 - DNA, 40 bp, Artificial sequence
  artificial DNA molecule for generation of DNA nanostructure
tgtttagtgaatcataattactagctcagagcgcaggtca

SEQ ID NO: 1871 - DNA, 48 bp, Artificial sequence
  artificial DNA molecule for generation of DNA nanostructure
ttcatttcaattacgggaatttgtgagagatagactttctccgtggtg

SEQ ID NO: 1872 - DNA, 44 bp, Artificial sequence
  artificial DNA molecule for generation of DNA nanostructure
gacgggagaattttttaactgaacacccaagttgggtaacgcca

SEQ ID NO: 1873 - DNA, 32 bp, Artificial sequence
  artificial DNA molecule for generation of DNA nanostructure
taacctcatcgcaagattccagtaaaagcgca

SEQ ID NO: 1874 - DNA, 48 bp, Artificial sequence
  artificial DNA molecule for generation of DNA nanostructure
gagacgcaggcgcgtactagaataccaagttacgggcgctagggcgct

SEQ ID NO: 1875 - DNA, 46 bp, Artificial sequence
  artificial DNA molecule for generation of DNA nanostructure
aaaagaagatgatgaaacagcgattttagaaacaatataacagtac

SEQ ID NO: 1876 - DNA, 45 bp, Artificial sequence
  artificial DNA molecule for generation of DNA nanostructure
tcatagcactcaaacctgagaaggtcagtattaacacaagtttgc

SEQ ID NO: 1877 - DNA, 49 bp, Artificial sequence
  artificial DNA molecule for generation of DNA nanostructure
tcgtaattttattcacagagccacctcataatcaaaatcactgcaacag

SEQ ID NO: 1878 - DNA, 40 bp, Artificial sequence
  artificial DNA molecule for generation of DNA nanostructure
atccccggctgtgcacgttaacggcatcagatgccgggtt

SEQ ID NO: 1879 - DNA, 32 bp, Artificial sequence
  artificial DNA molecule for generation of DNA nanostructure
gtgaggcgtgtttttaattaaagggaaaggag

SEQ ID NO: 1880 - DNA, 48 bp, Artificial sequence
  artificial DNA molecule for generation of DNA nanostructure
agcaagcgattccacaccgtaaatcaaaagaaaaagggagcccccgat

SEQ ID NO: 1881 - DNA, 40 bp, Artificial sequence
  artificial DNA molecule for generation of DNA nanostructure
aatcaagattagttgcctaagaacgcgaggcgaccagtat

SEQ ID NO: 1882 - DNA, 47 bp, Artificial sequence
  artificial DNA molecule for generation of DNA nanostructure
tgataaataggttgagcgccaccctttaccacccttattagcgtttg

SEQ ID NO: 1883 - DNA, 38 bp, Artificial sequence
  artificial DNA molecule for generation of DNA nanostructure
aatggtttcagacgccagcggtgccggtgcaaaaagcc

SEQ ID NO: 1884 - DNA, 39 bp, Artificial sequence
  artificial DNA molecule for generation of DNA nanostructure
gtgtgttccctaatgctcctcaccgctcacagtccacgc

SEQ ID NO: 1885 - DNA, 48 bp, Artificial sequence
  artificial DNA molecule for generation of DNA nanostructure
agaggtggagccgttaccagtgccaagctttcatgtttactttttaat

SEQ ID NO: 1886 - DNA, 49 bp, Artificial sequence
  artificial DNA molecule for generation of DNA nanostructure
aattttattcagatatagaaggcttaattgaaacattttttagataagt

SEQ ID NO: 1887 - DNA, 40 bp, Artificial sequence
  artificial DNA molecule for generation of DNA nanostructure
acctgcagatccagcgcagtgtcacggaaccatatcggcc

SEQ ID NO: 1888 - DNA, 48 bp, Artificial sequence
  artificial DNA molecule for generation of DNA nanostructure
ttttagcgataatatctccagagcctaaaaactttttcaaatatattt

SEQ ID NO: 1889 - DNA, 48 bp, Artificial sequence
  artificial DNA molecule for generation of DNA nanostructure
cctgaacaagaagaataaacaccgatcatatgcgttatacaaattctt

SEQ ID NO: 1890 - DNA, 47 bp, Artificial sequence
  artificial DNA molecule for generation of DNA nanostructure
cgcagaggcgaattaatcgggagacaggaacaatccgcctgcaacag

SEQ ID NO: 1891 - DNA, 48 bp, Artificial sequence
  artificial DNA molecule for generation of DNA nanostructure
cccctgcatgaaataccgaccgtgtagttaatcagaatggagcgtcat

SEQ ID NO: 1892 - DNA, 45 bp, Artificial sequence
  artificial DNA molecule for generation of DNA nanostructure
gcgcggggagaggagctaaagactttttcatgaggaagtttccat

SEQ ID NO: 1893 - DNA, 36 bp, Artificial sequence
  artificial DNA molecule for generation of DNA nanostructure
gcgtatttacgtaatacgccaaaaggaattacgagg

SEQ ID NO: 1894 - DNA, 39 bp, Artificial sequence
  artificial DNA molecule for generation of DNA nanostructure
atattcggaaatgtttcgagaggcattattaataaaaac

SEQ ID NO: 1895 - DNA, 42 bp, Artificial sequence
  artificial DNA molecule for generation of DNA nanostructure
caatgacaggaacgaggccgcttaacgaaagaggcaaaagaa

SEQ ID NO: 1896 - DNA, 43 bp, Artificial sequence
  artificial DNA molecule for generation of DNA nanostructure
tacactaaagcaacggctacagaggctcaacctaattgcggga

SEQ ID NO: 1897 - DNA, 37 bp, Artificial sequence
  artificial DNA molecule for generation of DNA nanostructure
taaacgggtaaaagggcgccaacgtcaaattgtagaa

SEQ ID NO: 1898 - DNA, 47 bp, Artificial sequence
  artificial DNA molecule for generation of DNA nanostructure
caaaatagacattcaaagacgacgcaggtagacaaacggcacccgtc

SEQ ID NO: 1899 - DNA, 45 bp, Artificial sequence
  artificial DNA molecule for generation of DNA nanostructure
catagtaagagcatggcccacaaatcccggaagggtaaagttaaa

SEQ ID NO: 1900 - DNA, 40 bp, Artificial sequence
  artificial DNA molecule for generation of DNA nanostructure
accggatattcatccgagccggaatccgcgacctgctcca

SEQ ID NO: 1901 - DNA, 48 bp, Artificial sequence
  artificial DNA molecule for generation of DNA nanostructure
agaaaatagtaccgcacgatttttcgctgagaacatagcgatagctta

SEQ ID NO: 1902 - DNA, 42 bp, Artificial sequence
  artificial DNA molecule for generation of DNA nanostructure
tcattaccgcgaacatgtatgttcagctaatgcagcctcaga

SEQ ID NO: 1903 - DNA, 39 bp, Artificial sequence
  artificial DNA molecule for generation of DNA nanostructure
gattaagatgttgccgtcgagagagttaccacatatgta

SEQ ID NO: 1904 - DNA, 50 bp, Artificial sequence
  artificial DNA molecule for generation of DNA nanostructure
ggtaataagaaatgaaacttgaaaagagtcaatagtgaacatcgtaggaa

SEQ ID NO: 1905 - DNA, 43 bp, Artificial sequence
  artificial DNA molecule for generation of DNA nanostructure
gcaaagtttaattgtcatacccaaatcaacaatcattgtgaat

SEQ ID NO: 1906 - DNA, 40 bp, Artificial sequence
  artificial DNA molecule for generation of DNA nanostructure
tgttactttactcagggccaccacagaatcgagataaatt

SEQ ID NO: 1907 - DNA, 41 bp, Artificial sequence
  artificial DNA molecule for generation of DNA nanostructure
taccttatgcgattttaagaaggacgacgagttcagaaaac

SEQ ID NO: 1908 - DNA, 41 bp, Artificial sequence
  artificial DNA molecule for generation of DNA nanostructure
gcgggaggttttgaagccttaggttatattgccagttacaa

SEQ ID NO: 1909 - DNA, 45 bp, Artificial sequence
  artificial DNA molecule for generation of DNA nanostructure
taaagtgtaaagcctggggtgagcaaatctctgtggtgctgcggc

SEQ ID NO: 1910 - DNA, 52 bp, Artificial sequence
  artificial DNA molecule for generation of DNA nanostructure
acggggaaagcaacatattgttatcagttgagggaataattttaaaagtttg

SEQ ID NO: 1911 - DNA, 37 bp, Artificial sequence
  artificial DNA molecule for generation of DNA nanostructure
taatcagtgagaaagggtgtgaaacgagccggaagca

SEQ ID NO: 1912 - DNA, 45 bp, Artificial sequence
  artificial DNA molecule for generation of DNA nanostructure
gtctctgattgacaggaaggcgttaaataaaaaacctcccgactt

SEQ ID NO: 1913 - DNA, 44 bp, Artificial sequence
  artificial DNA molecule for generation of DNA nanostructure
ttgaattacctcagtcccgcgaaacgtacagcgcctgaagtttt

SEQ ID NO: 1914 - DNA, 41 bp, Artificial sequence
  artificial DNA molecule for generation of DNA nanostructure
caaaatcgaagggatagctctcacggaaaaattagagcttg

SEQ ID NO: 1915 - DNA, 42 bp, Artificial sequence
  artificial DNA molecule for generation of DNA nanostructure
gaacggaggaaacaggtaaatgctgatgcaaatcaatttcat

SEQ ID NO: 1916 - DNA, 48 bp, Artificial sequence
  artificial DNA molecule for generation of DNA nanostructure
agtttgactcaaatcaccaggacagatgaacggcctcagagtagtagc

SEQ ID NO: 1917 - DNA, 46 bp, Artificial sequence
  artificial DNA molecule for generation of DNA nanostructure
ttcgcaaatggtcttaaaaagggtgagaaaggccgtttttagacag

SEQ ID NO: 1918 - DNA, 41 bp, Artificial sequence
  artificial DNA molecule for generation of DNA nanostructure
ctcattttttactaatagcataaagctaaatcggataaatt

SEQ ID NO: 1919 - DNA, 40 bp, Artificial sequence
  artificial DNA molecule for generation of DNA nanostructure
cataggctcaatcatatagccggaacgaggcgtatgggat

SEQ ID NO: 1920 - DNA, 48 bp, Artificial sequence
  artificial DNA molecule for generation of DNA nanostructure
caccagaaattcattatcatacaggcaagagacaatgaaaaaaataat

SEQ ID NO: 1921 - DNA, 48 bp, Artificial sequence
  artificial DNA molecule for generation of DNA nanostructure
ccagcaaattttttcaccagtacgacatttttttaaccgattttcata

SEQ ID NO: 1922 - DNA, 51 bp, Artificial sequence
  artificial DNA molecule for generation of DNA nanostructure
catttgggattaagacacatgtaatttagcttataaagccactcagtacca

SEQ ID NO: 1923 - DNA, 47 bp, Artificial sequence
  artificial DNA molecule for generation of DNA nanostructure
aaacaggaagatatcaggtctttttttgcctgagagtctggagcaaa

SEQ ID NO: 1924 - DNA, 46 bp, Artificial sequence
  artificial DNA molecule for generation of DNA nanostructure
tatttaaagcgacagcgtcaccgcagtgtaaaacgacggccagtgc

SEQ ID NO: 1925 - DNA, 48 bp, Artificial sequence
  artificial DNA molecule for generation of DNA nanostructure
cagcagttgggcggtgtaaacgttaatttttattttgttaaagcccca

SEQ ID NO: 1926 - DNA, 46 bp, Artificial sequence
  artificial DNA molecule for generation of DNA nanostructure
atcaaacttaaataaattcatcaatttttattaaatgtcacggaaa

SEQ ID NO: 1927 - DNA, 40 bp, Artificial sequence
  artificial DNA molecule for generation of DNA nanostructure
aaatcaagattagttgtgccagttacaaagaaatacataa

SEQ ID NO: 1928 - DNA, 40 bp, Artificial sequence
  artificial DNA molecule for generation of DNA nanostructure
gaaaatacctggcatgaattagagatcgatagcagcaccg

SEQ ID NO: 1929 - DNA, 40 bp, Artificial sequence
  artificial DNA molecule for generation of DNA nanostructure
caaacgtataattgagataacggaatacccaagcgcagag

SEQ ID NO: 1930 - DNA, 48 bp, Artificial sequence
  artificial DNA molecule for generation of DNA nanostructure
ggtagctatttttgagcaactttgaaagatcagtgtcgaaatccgcga

SEQ ID NO: 1931 - DNA, 47 bp, Artificial sequence
  artificial DNA molecule for generation of DNA nanostructure
tatgttaggacgttagacaactttcaacagtttcagcggtcagaggg

SEQ ID NO: 1932 - DNA, 49 bp, Artificial sequence
  artificial DNA molecule for generation of DNA nanostructure
ttattttgtcatagaaaggaacaactaaaggaatttttttcgaataata

SEQ ID NO: 1933 - DNA, 48 bp, Artificial sequence
  artificial DNA molecule for generation of DNA nanostructure
attttctgagacagccttcattaaccagtcacgacgtcattgacagga

SEQ ID NO: 1934 - DNA, 51 bp, Artificial sequence
  artificial DNA molecule for generation of DNA nanostructure
atatgatattcatttttccgttctagctcaagcgcgaaacaaagtacaacg

SEQ ID NO: 1935 - DNA, 47 bp, Artificial sequence
  artificial DNA molecule for generation of DNA nanostructure
accaggcgtcgtcgctggcagtctacaaaggcttgtataaaaagctg

SEQ ID NO: 1936 - DNA, 45 bp, Artificial sequence
  artificial DNA molecule for generation of DNA nanostructure
aaaaaaatattctcccaaagcgccattcagaggtggaggtgatga

SEQ ID NO: 1937 - DNA, 48 bp, Artificial sequence
  artificial DNA molecule for generation of DNA nanostructure
tcataacgcagacggtggctgaccacagcaaagaattagcaaaagtaa

SEQ ID NO: 1938 - DNA, 47 bp, Artificial sequence
  artificial DNA molecule for generation of DNA nanostructure
gcctgtagcattccacgaacgtgcgggttttcaggcgttttttcgtc

SEQ ID NO: 1939 - DNA, 46 bp, Artificial sequence
  artificial DNA molecule for generation of DNA nanostructure
cattagattttttacattgattcctttttaattctgccgtccaata

SEQ ID NO: 1940 - DNA, 48 bp, Artificial sequence
  artificial DNA molecule for generation of DNA nanostructure
cctgctccgcaataaagtgtacagaacgtaacgcagattgccgttccg

SEQ ID NO: 1941 - DNA, 50 bp, Artificial sequence
  artificial DNA molecule for generation of DNA nanostructure
agatttgtatcatcgcctgttgtaccaaaaacattattttttaccctgta

SEQ ID NO: 1942 - DNA, 50 bp, Artificial sequence
  artificial DNA molecule for generation of DNA nanostructure
atacttttgctatattttcatttggtttttgcgcgagctgaaaaggtggc

SEQ ID NO: 1943 - DNA, 39 bp, Artificial sequence
  artificial DNA molecule for generation of DNA nanostructure
gggatgtgctttttgcaaggcgattaaggctgcgcaact

SEQ ID NO: 1944 - DNA, 48 bp, Artificial sequence
  artificial DNA molecule for generation of DNA nanostructure
cattgtgaattacagagtcaggattaatgctgtagctcaaatcaattc

SEQ ID NO: 1945 - DNA, 36 bp, Artificial sequence
  artificial DNA molecule for generation of DNA nanostructure
gccattcagttgggtaacgccacggacttcacatcc

SEQ ID NO: 1946 - DNA, 48 bp, Artificial sequence
  artificial DNA molecule for generation of DNA nanostructure
agcgtcagaacgctcatgaaataccaaatccaatcgcaagacaaagaa

SEQ ID NO: 1947 - DNA, 40 bp, Artificial sequence
  artificial DNA molecule for generation of DNA nanostructure
gaacaaagagtgagaacaatcaatagatgtcgtctttcca

SEQ ID NO: 1948 - DNA, 39 bp, Artificial sequence
  artificial DNA molecule for generation of DNA nanostructure
gataacccttcatcaagagtcagggaaattactcatagt

SEQ ID NO: 1949 - DNA, 48 bp, Artificial sequence
  artificial DNA molecule for generation of DNA nanostructure
caagctttcgcaaacgcggtctgaaaccggatcgagtagaagcatttt

SEQ ID NO: 1950 - DNA, 49 bp, Artificial sequence
  artificial DNA molecule for generation of DNA nanostructure
gcagatagccgaacaagcaagaaaattgagttagaatatataatcgcca

SEQ ID NO: 1951 - DNA, 48 bp, Artificial sequence
  artificial DNA molecule for generation of DNA nanostructure
agacctccggccagaggtagaacgtcagcgtggttttttctggtctgg

SEQ ID NO: 1952 - DNA, 52 bp, Artificial sequence
  artificial DNA molecule for generation of DNA nanostructure
ttgggaagggcgggcaccgcttcttttttgtgccggatttaaatttgtgtac

SEQ ID NO: 1953 - DNA, 39 bp, Artificial sequence
  artificial DNA molecule for generation of DNA nanostructure
aagcccaaacgaatcttgacaagattatcacggccttta

SEQ ID NO: 1954 - DNA, 48 bp, Artificial sequence
  artificial DNA molecule for generation of DNA nanostructure
attaacatgcttaattttgccctgactttaatatcgacatatagctct

SEQ ID NO: 1955 - DNA, 48 bp, Artificial sequence
  artificial DNA molecule for generation of DNA nanostructure
ccaagaacttgcgggaggttttgaaaaataaacagccataaacaccct

SEQ ID NO: 1956 - DNA, 42 bp, Artificial sequence
  artificial DNA molecule for generation of DNA nanostructure
tgcggaatagttttgcctttttgaggaacggaacaacattat

SEQ ID NO: 1957 - DNA, 48 bp, Artificial sequence
  artificial DNA molecule for generation of DNA nanostructure
ccgccacgggaacgcctccctcaggccgccgcacttgagcatattgac

SEQ ID NO: 1958 - DNA, 44 bp, Artificial sequence
  artificial DNA molecule for generation of DNA nanostructure
gtgggaacaaacggcgtttttattgaccgtaatgggagccagct

SEQ ID NO: 1959 - DNA, 46 bp, Artificial sequence
  artificial DNA molecule for generation of DNA nanostructure
cggaaccagagccatcatagccgcgcgttttcatcggctaatggtt

SEQ ID NO: 1960 - DNA, 45 bp, Artificial sequence
  artificial DNA molecule for generation of DNA nanostructure
aaaagccgggcttgaatttcaaactttttcaaatatataccagtc

SEQ ID NO: 1961 - DNA, 47 bp, Artificial sequence
  artificial DNA molecule for generation of DNA nanostructure
gagcgagtaacaacccgtgaaactcggccggcccgtaaaagggtaaa

SEQ ID NO: 1962 - DNA, 39 bp, Artificial sequence
  artificial DNA molecule for generation of DNA nanostructure
gtacagcgtagactttctccgtgttttagttagatggtt

SEQ ID NO: 1963 - DNA, 40 bp, Artificial sequence
  artificial DNA molecule for generation of DNA nanostructure
accagtccattttcggccaccggattgccttttaatcagt

SEQ ID NO: 1964 - DNA, 45 bp, Artificial sequence
  artificial DNA molecule for generation of DNA nanostructure
gcattttccaggctgtctttccgctgatgcgaccgtgtgataaat

SEQ ID NO: 1965 - DNA, 49 bp, Artificial sequence
  artificial DNA molecule for generation of DNA nanostructure
gtaaaatgcagaaactttttagcgggcaaaagacgtcataacaaatatc

SEQ ID NO: 1966 - DNA, 48 bp, Artificial sequence
  artificial DNA molecule for generation of DNA nanostructure
catgttttaaatatgccagaccggaagcaaacaacgaactgggtaata

SEQ ID NO: 1967 - DNA, 48 bp, Artificial sequence
  artificial DNA molecule for generation of DNA nanostructure
atcccatcatgttcagcgacaaaacgcgagaatcttctgacctaaatt

SEQ ID NO: 1968 - DNA, 48 bp, Artificial sequence
  artificial DNA molecule for generation of DNA nanostructure
actacaactagcgtaacgatctaaagtttaaagagggagggaaggtaa

SEQ ID NO: 1969 - DNA, 48 bp, Artificial sequence
  artificial DNA molecule for generation of DNA nanostructure
aagagacgtttcttatgcgattttgggaagaaaaatctacgttaataa

SEQ ID NO: 1970 - DNA, 48 bp, Artificial sequence
  artificial DNA molecule for generation of DNA nanostructure
gcttaggttgggttatataactatatgtaaatttatcattttaccagt

SEQ ID NO: 1971 - DNA, 48 bp, Artificial sequence
  artificial DNA molecule for generation of DNA nanostructure
ggtaaagtgcttaattgagaaattgcacaggcgtgagagaccatgttt

SEQ ID NO: 1972 - DNA, 40 bp, Artificial sequence
  artificial DNA molecule for generation of DNA nanostructure
cggaatttaatcaagtaccggataacctcaccggaaacaa

SEQ ID NO: 1973 - DNA, 48 bp, Artificial sequence
  artificial DNA molecule for generation of DNA nanostructure
ttgctccttaatttcaacgagaaagttaaacgatgctaataaaccagg

SEQ ID NO: 1974 - DNA, 48 bp, Artificial sequence
  artificial DNA molecule for generation of DNA nanostructure
tagagagtacctttaaaggacgttaagaactggctcattagtgaaggg

SEQ ID NO: 1975 - DNA, 48 bp, Artificial sequence
  artificial DNA molecule for generation of DNA nanostructure
tccaacagctggataggaacgagtagacagtgaataaggcgctgaata

SEQ ID NO: 1976 - DNA, 45 bp, Artificial sequence
  artificial DNA molecule for generation of DNA nanostructure
acaggtattcaatttttgcgaacaactaatttttgtacggtgtct

SEQ ID NO: 1977 - DNA, 40 bp, Artificial sequence
  artificial DNA molecule for generation of DNA nanostructure
ggagttaagctagggcgagcgggagttgcttttggaaata

SEQ ID NO: 1978 - DNA, 39 bp, Artificial sequence
  artificial DNA molecule for generation of DNA nanostructure
gcattaatgaatcggccaacgaatactcagggaacctat

SEQ ID NO: 1979 - DNA, 36 bp, Artificial sequence
  artificial DNA molecule for generation of DNA nanostructure
aatttatcaaaatttattttaaagcctgtacaattt

SEQ ID NO: 1980 - DNA, 40 bp, Artificial sequence
  artificial DNA molecule for generation of DNA nanostructure
gctgagaacatagcgatagcttagaagtattaagcccgga

SEQ ID NO: 1981 - DNA, 50 bp, Artificial sequence
  artificial DNA molecule for generation of DNA nanostructure
ggtcagacgagccgccaccagtttttaccaccaccagaagccgccaccct

SEQ ID NO: 1982 - DNA, 39 bp, Artificial sequence
  artificial DNA molecule for generation of DNA nanostructure
ccgagctcgaattcgtaatcatggtcatagctttccaca

SEQ ID NO: 1983 - DNA, 47 bp, Artificial sequence
  artificial DNA molecule for generation of DNA nanostructure
aataccaaacccatgtacaaacaattgctggtaatatagatttcgag

SEQ ID NO: 1984 - DNA, 22 bp, Artificial sequence
  artificial DNA molecule for generation of DNA nanostructure
tctctgaatataaatcctcatt

SEQ ID NO: 1985 - DNA, 38 bp, Artificial sequence
  artificial DNA molecule for generation of DNA nanostructure
aaagccagaatggggcttttgatgatcacctcccagaa

SEQ ID NO: 1986 - DNA, 50 bp, Artificial sequence
  artificial DNA molecule for generation of DNA nanostructure
attttttctaaaaacagggaagcgcattttttagacgggagaattaactg

SEQ ID NO: 1987 - DNA, 49 bp, Artificial sequence
  artificial DNA molecule for generation of DNA nanostructure
aaaaaaaggccgacaatgacaacatgataccgatagttgccaaattttc

SEQ ID NO: 1988 - DNA, 40 bp, Artificial sequence
  artificial DNA molecule for generation of DNA nanostructure
agttaatgccccctgcagcgtaagaaaacatccattctgg

SEQ ID NO: 1989 - DNA, 47 bp, Artificial sequence
  artificial DNA molecule for generation of DNA nanostructure
gtataaactattctgaaacatgatgttatcccttctgtaaatcgtcg

SEQ ID NO: 1990 - DNA, 47 bp, Artificial sequence
  artificial DNA molecule for generation of DNA nanostructure
ccatcttttgagtaacagtgcccacggggtcataggtgtaccctcag

SEQ ID NO: 1991 - DNA, 48 bp, Artificial sequence
  artificial DNA molecule for generation of DNA nanostructure
cgcgagtttttcgttttagcgaacctcccgacgggtattaaaccaagt

SEQ ID NO: 1992 - DNA, 47 bp, Artificial sequence
  artificial DNA molecule for generation of DNA nanostructure
tccggtattctaagaagaacaagcaagccgtttcataggtctgagag

SEQ ID NO: 1993 - DNA, 50 bp, Artificial sequence
  artificial DNA molecule for generation of DNA nanostructure
agatatagaaggcttaacgtcaaaagcgtcttgaaacgcaaagcctttaa

SEQ ID NO: 1994 - DNA, 48 bp, Artificial sequence
  artificial DNA molecule for generation of DNA nanostructure
caacatacctatttcgaaaagggagccattaaaaataaataagtttta

SEQ ID NO: 1995 - DNA, 44 bp, Artificial sequence
  artificial DNA molecule for generation of DNA nanostructure
agggataactgagtttcgtcatttttcagtacaaggttgaggca

SEQ ID NO: 1996 - DNA, 37 bp, Artificial sequence
  artificial DNA molecule for generation of DNA nanostructure
ggtttaccagcgcgctccaaaaggagacaaatctcca

SEQ ID NO: 1997 - DNA, 39 bp, Artificial sequence
  artificial DNA molecule for generation of DNA nanostructure
agtgagctgagcctcctcacagttgaggatcattgccct

SEQ ID NO: 1998 - DNA, 49 bp, Artificial sequence
  artificial DNA molecule for generation of DNA nanostructure
cgcgaactgatagccctaatacgtgacccttctgacctgaagagccgga

SEQ ID NO: 1999 - DNA, 37 bp, Artificial sequence
  artificial DNA molecule for generation of DNA nanostructure
agtgccttcagagccacacaggagtgtacttaccgcc

SEQ ID NO: 2000 - DNA, 39 bp, Artificial sequence
  artificial DNA molecule for generation of DNA nanostructure
gagtgtttcttttcatgcgccgctacagaaaagcgaaag

SEQ ID NO: 2001 - DNA, 35 bp, Artificial sequence
  artificial DNA molecule for generation of DNA nanostructure
atagggtttggccctgagagagtgcgtccgtaact

SEQ ID NO: 2002 - DNA, 40 bp, Artificial sequence
  artificial DNA molecule for generation of DNA nanostructure
ggtccgaacgaaccaccagcagaaaaaatctaacaggaaa

SEQ ID NO: 2003 - DNA, 45 bp, Artificial sequence
  artificial DNA molecule for generation of DNA nanostructure
agaacagcaaggcgggttgattaattttcccttagaacatcgtag

SEQ ID NO: 2004 - DNA, 51 bp, Artificial sequence
  artificial DNA molecule for generation of DNA nanostructure
acaccggaatcataattaggattatttttggattaaaggcgttacaaattc

SEQ ID NO: 2005 - DNA, 44 bp, Artificial sequence
  artificial DNA molecule for generation of DNA nanostructure
ttatttatcccaatccaaatttttaagaaacgattttttgttta

SEQ ID NO: 2006 - DNA, 41 bp, Artificial sequence
  artificial DNA molecule for generation of DNA nanostructure
actacctttttttttaacctccgaccgcattttttcatcga

SEQ ID NO: 2007 - DNA, 39 bp, Artificial sequence
  artificial DNA molecule for generation of DNA nanostructure
aacagctaccatcgcccacgcataaccgatatattcggt

SEQ ID NO: 2008 - DNA, 39 bp, Artificial sequence
  artificial DNA molecule for generation of DNA nanostructure
ttacctgagcaaaagagttacaaatatcggccttaccgt

SEQ ID NO: 2009 - DNA, 47 bp, Artificial sequence
  artificial DNA molecule for generation of DNA nanostructure
caaatgagataaaacttcaccagccaacagatgccagctagcataaa

SEQ ID NO: 2010 - DNA, 47 bp, Artificial sequence
  artificial DNA molecule for generation of DNA nanostructure
acagtacaaaccgccaccctcattcgccaccctcataatcaaaatca

SEQ ID NO: 2011 - DNA, 31 bp, Artificial sequence
  artificial DNA molecule for generation of DNA nanostructure
gagcgggcaggccgcttttttataatcagtg

SEQ ID NO: 2012 - DNA, 49 bp, Artificial sequence
  artificial DNA molecule for generation of DNA nanostructure
taaatcaaatttaacaatttcattcagcttgcgccaccaccctcagaca

SEQ ID NO: 2013 - DNA, 47 bp, Artificial sequence
  artificial DNA molecule for generation of DNA nanostructure
atcaccgtaaccttggctcacaagtttcctgtgtgaaatattaagac

SEQ ID NO: 2014 - DNA, 48 bp, Artificial sequence
  artificial DNA molecule for generation of DNA nanostructure
tgaacctcttgcctgaaacgctcagacgagcacgtattgggcgccagg

SEQ ID NO: 2015 - DNA, 49 bp, Artificial sequence
  artificial DNA molecule for generation of DNA nanostructure
tccagtcatcaccttgctcgcctgagaggcgaattaccgagtaaaagag

SEQ ID NO: 2016 - DNA, 47 bp, Artificial sequence
  artificial DNA molecule for generation of DNA nanostructure
ttggccttgatattcaccgtaacgcaagcccaataggaagattctta

SEQ ID NO: 2017 - DNA, 31 bp, Artificial sequence
  artificial DNA molecule for generation of DNA nanostructure
tttaaaagcctaatggctttccatcaccgcc

SEQ ID NO: 2018 - DNA, 41 bp, Artificial sequence
  artificial DNA molecule for generation of DNA nanostructure
ccagtaatccattgcaaagaagcgtcatacataaagcgcag

SEQ ID NO: 2019 - DNA, 42 bp, Artificial sequence
  artificial DNA molecule for generation of DNA nanostructure
acccagctttagtatcatttttatgcgttataaataagaata

SEQ ID NO: 2020 - DNA, 44 bp, Artificial sequence
  artificial DNA molecule for generation of DNA nanostructure
gcggggttttgctgtacccttatttttttgcgtttgagactcct

SEQ ID NO: 2021 - DNA, 44 bp, Artificial sequence
  artificial DNA molecule for generation of DNA nanostructure
ttgtatcggtttattgaattacaccagaaccgccacccctcaga

SEQ ID NO: 2022 - DNA, 49 bp, Artificial sequence
  artificial DNA molecule for generation of DNA nanostructure
gtgaattgatgaaacaaacatccttactcaaacatcgcgcattgctttg

SEQ ID NO: 2023 - DNA, 48 bp, Artificial sequence
  artificial DNA molecule for generation of DNA nanostructure
aggtggcaacatttttttaaaatccagagtttttctaattctattttg

SEQ ID NO: 2024 - DNA, 36 bp, Artificial sequence
  artificial DNA molecule for generation of DNA nanostructure
caagagaactagaatccttgaaaagagtcaatagtg

SEQ ID NO: 2025 - DNA, 51 bp, Artificial sequence
  artificial DNA molecule for generation of DNA nanostructure
ggcggatatttttgtgccgtcgagacggaaacgtcatttttcaatgaaacc

SEQ ID NO: 2026 - DNA, 37 bp, Artificial sequence
  artificial DNA molecule for generation of DNA nanostructure
gtagaagatcctcgtatttcaacgctgaggcttgcag

SEQ ID NO: 2027 - DNA, 38 bp, Artificial sequence
  artificial DNA molecule for generation of DNA nanostructure
caatattttaattactatatgtgagtgcgcggggagag

SEQ ID NO: 2028 - DNA, 42 bp, Artificial sequence
  artificial DNA molecule for generation of DNA nanostructure
tgaaccatcacaaaatcccttataaatccacgctggtttgcc

SEQ ID NO: 2029 - DNA, 45 bp, Artificial sequence
  artificial DNA molecule for generation of DNA nanostructure
gcgaaaggtcagcagctggtgccatcccacgcaaccagccggaga

SEQ ID NO: 2030 - DNA, 48 bp, Artificial sequence
  artificial DNA molecule for generation of DNA nanostructure
aatgccatacagtaacagttggcgtaaaaacagaaataaaccgcactc

SEQ ID NO: 2031 - DNA, 47 bp, Artificial sequence
  artificial DNA molecule for generation of DNA nanostructure
ggaagtttgcgttttaattcgagcgaaagattcatcagttgagattt

SEQ ID NO: 2032 - DNA, 44 bp, Artificial sequence
  artificial DNA molecule for generation of DNA nanostructure
ttggcagaagaggtgtttttggcggtcagtaattagtctttaat

SEQ ID NO: 2033 - DNA, 46 bp, Artificial sequence
  artificial DNA molecule for generation of DNA nanostructure
acctgtcggattatcattttgcggaacaatttttgaaaccaccaga

SEQ ID NO: 2034 - DNA, 42 bp, Artificial sequence
  artificial DNA molecule for generation of DNA nanostructure
cgtctgaaatttttggatgttccagtgaaggcgcgtactatg

SEQ ID NO: 2035 - DNA, 49 bp, Artificial sequence
  artificial DNA molecule for generation of DNA nanostructure
aacatcacaaatttttttcaaaccctccacgctgagatttttccagcag

SEQ ID NO: 2036 - DNA, 46 bp, Artificial sequence
  artificial DNA molecule for generation of DNA nanostructure
ttctttgtttttttagtaattctgtccatttttcacgcaaattaac

SEQ ID NO: 2037 - DNA, 32 bp, Artificial sequence
  artificial DNA molecule for generation of DNA nanostructure
atcggtgcatgtaccccaagagaatgagtaat

SEQ ID NO: 2038 - DNA, 45 bp, Artificial sequence
  artificial DNA molecule for generation of DNA nanostructure
aacagtgcaatcaatatctggtcagtacctaacgtcagatgaata

SEQ ID NO: 2039 - DNA, 49 bp, Artificial sequence
  artificial DNA molecule for generation of DNA nanostructure
gaaaggatgcttatttgcacgtaaaggtcactgatcgttaacggagaat

SEQ ID NO: 2040 - DNA, 44 bp, Artificial sequence
  artificial DNA molecule for generation of DNA nanostructure
aggggacgacgacaatatctttcaatagattacaaacaattcga

SEQ ID NO: 2041 - DNA, 39 bp, Artificial sequence
  artificial DNA molecule for generation of DNA nanostructure
ataattcgcgtctggcgacgataagctttaaacagttca

SEQ ID NO: 2042 - DNA, 48 bp, Artificial sequence
  artificial DNA molecule for generation of DNA nanostructure
ataggtcaaccaatagtttgttaaaatcaaaataaatgcaatgcggta

SEQ ID NO: 2043 - DNA, 51 bp, Artificial sequence
  artificial DNA molecule for generation of DNA nanostructure
taacatagagcacagacattttttatttttgctttgcccgaacgttattaa

SEQ ID NO: 2044 - DNA, 48 bp, Artificial sequence
  artificial DNA molecule for generation of DNA nanostructure
taggagcactgattatgattgtttttcagcaattgccctgcggctggt

SEQ ID NO: 2045 - DNA, 35 bp, Artificial sequence
  artificial DNA molecule for generation of DNA nanostructure
cgttggtgtagattaaagtatcggcctcaggaaga

SEQ ID NO: 2046 - DNA, 40 bp, Artificial sequence
  artificial DNA molecule for generation of DNA nanostructure
ttccattaaagaaattgcgtatgtagcaatacgggttaga

SEQ ID NO: 2047 - DNA, 49 bp, Artificial sequence
  artificial DNA molecule for generation of DNA nanostructure
aaagggcttggaacatttttgagtccagcgttgcgttttttcactgccc

SEQ ID NO: 2048 - DNA, 48 bp, Artificial sequence
  artificial DNA molecule for generation of DNA nanostructure
aaggtttctttgccgtaagtttttttagagcttgacggggacgagggt

SEQ ID NO: 2049 - DNA, 47 bp, Artificial sequence
  artificial DNA molecule for generation of DNA nanostructure
tgagccgctagcatgcatcaataatcgggcgcatcagccagctttcc

SEQ ID NO: 2050 - DNA, 40 bp, Artificial sequence
  artificial DNA molecule for generation of DNA nanostructure
gaaccctcaatcagaaaaattcgcattaaattgaacgcca

SEQ ID NO: 2051 - DNA, 48 bp, Artificial sequence
  artificial DNA molecule for generation of DNA nanostructure
gaggaagtaatgggtaacctaccacttctgaataatggaaaggagcgg

SEQ ID NO: 2052 - DNA, 47 bp, Artificial sequence
  artificial DNA molecule for generation of DNA nanostructure
gctaaacaggaggccgattaatttttgggattttagacaggaagact

SEQ ID NO: 2053 - DNA, 39 bp, Artificial sequence
  artificial DNA molecule for generation of DNA nanostructure
tgcagcatttttagcggtcaatttttagaatagcccgag

SEQ ID NO: 2054 - DNA, 40 bp, Artificial sequence
  artificial DNA molecule for generation of DNA nanostructure
gaatgcgggtgcactctgtggtgccaactcgttcatattc

SEQ ID NO: 2055 - DNA, 48 bp, Artificial sequence
  artificial DNA molecule for generation of DNA nanostructure
gctttgaggactaaacagcaacggctacagagactacgaaaaagggag

SEQ ID NO: 2056 - DNA, 44 bp, Artificial sequence
  artificial DNA molecule for generation of DNA nanostructure
ggtacgccagattttttcctgagaagtgtttgcgggatcgtcac

SEQ ID NO: 2057 - DNA, 47 bp, Artificial sequence
  artificial DNA molecule for generation of DNA nanostructure
cctcagcagtttttgaaagacagcatcggaaaagccggcgaacgtgg

SEQ ID NO: 2058 - DNA, 48 bp, Artificial sequence
  artificial DNA molecule for generation of DNA nanostructure
gattatacgataaattaatgcttacggctggagtgtaggtaaagattc

SEQ ID NO: 2059 - DNA, 46 bp, Artificial sequence
  artificial DNA molecule for generation of DNA nanostructure
aatccgccgggcgcggttgcctcgatgaaaccgtcggaaccgcaag

SEQ ID NO: 2060 - DNA, 45 bp, Artificial sequence
  artificial DNA molecule for generation of DNA nanostructure
gaccataatcagctctcaatcatgggcctcttcgcttcaacagtt

SEQ ID NO: 2061 - DNA, 50 bp, Artificial sequence
  artificial DNA molecule for generation of DNA nanostructure
gagaaaggaagggaagaaccgtctatcagggcgatggtttttccactacg

SEQ ID NO: 2062 - DNA, 36 bp, Artificial sequence
  artificial DNA molecule for generation of DNA nanostructure
ggggtttctgccagcacgcgtgtttttctgttcttc

SEQ ID NO: 2063 - DNA, 40 bp, Artificial sequence
  artificial DNA molecule for generation of DNA nanostructure
cctcaaataaaccaaaactaatgcagatacataacgccaa

SEQ ID NO: 2064 - DNA, 46 bp, Artificial sequence
  artificial DNA molecule for generation of DNA nanostructure
ctaacaacttaacaccgccattgaggaaggtttaatcctcagatga

SEQ ID NO: 2065 - DNA, 48 bp, Artificial sequence
  artificial DNA molecule for generation of DNA nanostructure
gtcgggaagtggtttttatttacacctacatttttttttacgctcaat

SEQ ID NO: 2066 - DNA, 40 bp, Artificial sequence
  artificial DNA molecule for generation of DNA nanostructure
cagacgatctattaaagaatcgtcataaacatcccttaca

SEQ ID NO: 2067 - DNA, 48 bp, Artificial sequence
  artificial DNA molecule for generation of DNA nanostructure
ccggtgccgcgcgcctcgggccgttttcacggtcataccgccagcagg

SEQ ID NO: 2068 - DNA, 39 bp, Artificial sequence
  artificial DNA molecule for generation of DNA nanostructure
aggaatacaagacttatattcatgactattaataacagt

SEQ ID NO: 2069 - DNA, 38 bp, Artificial sequence
  artificial DNA molecule for generation of DNA nanostructure
tcagatgatcataaacgaggcatagtaagatgcggcca

SEQ ID NO: 2070 - DNA, 49 bp, Artificial sequence
  artificial DNA molecule for generation of DNA nanostructure
gaaaacgcatggcaattattagacttaatacatttgaggatcttcctgt

SEQ ID NO: 2071 - DNA, 47 bp, Artificial sequence
  artificial DNA molecule for generation of DNA nanostructure
gcatcagcggggtcaacggcagccggtaatcaaaattacgccagctg

SEQ ID NO: 2072 - DNA, 48 bp, Artificial sequence
  artificial DNA molecule for generation of DNA nanostructure
cattccattagtcagatttaataacctgtttagcgggagaagccttta

SEQ ID NO: 2073 - DNA, 40 bp, Artificial sequence
  artificial DNA molecule for generation of DNA nanostructure
aaggaattccctcgtttaccagacttagaagtatttttta

SEQ ID NO: 2074 - DNA, 48 bp, Artificial sequence
  artificial DNA molecule for generation of DNA nanostructure
ttgcaggcgctttgggcctaaaacgaaagaggcaaaagaatacactaa

SEQ ID NO: 2075 - DNA, 38 bp, Artificial sequence
  artificial DNA molecule for generation of DNA nanostructure
caggttttttacatcgggagaatttttcaataacggat

SEQ ID NO: 2076 - DNA, 47 bp, Artificial sequence
  artificial DNA molecule for generation of DNA nanostructure
cagcggtgaattatcaattaaatcaatggcttaatagattagagccg

SEQ ID NO: 2077 - DNA, 48 bp, Artificial sequence
  artificial DNA molecule for generation of DNA nanostructure
gcaacactccgggttacctgcagcctggtgtgggattatatatcaaaa

SEQ ID NO: 2078 - DNA, 32 bp, Artificial sequence
  artificial DNA molecule for generation of DNA nanostructure
tcgcactccgtaaccgtgcatctgccagtttg

SEQ ID NO: 2079 - DNA, 45 bp, Artificial sequence
  artificial DNA molecule for generation of DNA nanostructure
tttgataagaggttacctaatgcagaacgcgcctgtttatcaaca

SEQ ID NO: 2080 - DNA, 36 bp, Artificial sequence
  artificial DNA molecule for generation of DNA nanostructure
tgcggatgaacaagatagcaatagctatcttaccga

SEQ ID NO: 2081 - DNA, 39 bp, Artificial sequence
  artificial DNA molecule for generation of DNA nanostructure
caacgccatccttattacgcaatacgctaatgaaggaaa

SEQ ID NO: 2082 - DNA, 43 bp, Artificial sequence
  artificial DNA molecule for generation of DNA nanostructure
caataatcgacgacgacaataaacaacctaatttagtaataag

SEQ ID NO: 2083 - DNA, 42 bp, Artificial sequence
  artificial DNA molecule for generation of DNA nanostructure
acagtaggaattctgtcgagccacgagcatgtagaaaccaat

SEQ ID NO: 2084 - DNA, 47 bp, Artificial sequence
  artificial DNA molecule for generation of DNA nanostructure
ccgaggaataataagaagttaccaatcagagatttgctaataaatga

SEQ ID NO: 2085 - DNA, 45 bp, Artificial sequence
  artificial DNA molecule for generation of DNA nanostructure
agccctttttaagaaaattaaatgttactagggaaccgaactgac

SEQ ID NO: 2086 - DNA, 37 bp, Artificial sequence
  artificial DNA molecule for generation of DNA nanostructure
atagataagtcctggcttagaccaataaacccaaatc

SEQ ID NO: 2087 - DNA, 40 bp, Artificial sequence
  artificial DNA molecule for generation of DNA nanostructure
tatcctgaatctttttagcaaatcgaatcattaccgcgcc

SEQ ID NO: 2088 - DNA, 43 bp, Artificial sequence
  artificial DNA molecule for generation of DNA nanostructure
aaaggggcaccattcttaccaacgctaacgaatgaaaatagca

SEQ ID NO: 2089 - DNA, 50 bp, Artificial sequence
  artificial DNA molecule for generation of DNA nanostructure
aggccattctagaatcagctggcaacccgccgcgcttaaccagtgagacg

SEQ ID NO: 2090 - DNA, 41 bp, Artificial sequence
  artificial DNA molecule for generation of DNA nanostructure
gcctttacagagagaataacaacgttgaaccacggaataag

SEQ ID NO: 2091 - DNA, 39 bp, Artificial sequence
  artificial DNA molecule for generation of DNA nanostructure
tgcgcgtagtgaagaaaacaaaaaccgccagaggtttag

SEQ ID NO: 2092 - DNA, 48 bp, Artificial sequence
  artificial DNA molecule for generation of DNA nanostructure
tcacacgagcggtttgcgtataacaccaccacagtgtagcggtcacgc

SEQ ID NO: 2093 - DNA, 40 bp, Artificial sequence
  artificial DNA molecule for generation of DNA nanostructure
caatagcataatggaactattaatataagtatagaggctg

SEQ ID NO: 2094 - DNA, 42 bp, Artificial sequence
  artificial DNA molecule for generation of DNA nanostructure
ggcaacagctgcccgggtagtgtaaagcctggggtgtttgag

SEQ ID NO: 2095 - DNA, 37 bp, Artificial sequence
  artificial DNA molecule for generation of DNA nanostructure
cggttgatatatatttatcaggtccggattgcatcaa

SEQ ID NO: 2096 - DNA, 45 bp, Artificial sequence
  artificial DNA molecule for generation of DNA nanostructure
aaagattaagaggaagcccgacacattcaatagcgagaggctttt

SEQ ID NO: 2097 - DNA, 44 bp, Artificial sequence
  artificial DNA molecule for generation of DNA nanostructure
atcggaaccctggcaccaataaaatacgtaatgcccgtgatttt

SEQ ID NO: 2098 - DNA, 41 bp, Artificial sequence
  artificial DNA molecule for generation of DNA nanostructure
ggtgtccaaacactcatctttgacccccagctttcaacgca

SEQ ID NO: 2099 - DNA, 42 bp, Artificial sequence
  artificial DNA molecule for generation of DNA nanostructure
ttttcatcccccgattggggtcgaggtgccgtaaagcactaa

SEQ ID NO: 2100 - DNA, 46 bp, Artificial sequence
  artificial DNA molecule for generation of DNA nanostructure
acattaattccagcgcagtgtcactccctgcatcgaaaatcctgtt

SEQ ID NO: 2101 - DNA, 41 bp, Artificial sequence
  artificial DNA molecule for generation of DNA nanostructure
tgatggtggttccgaaatcggcccaaatcggactccaacgt

SEQ ID NO: 2102 - DNA, 52 bp, Artificial sequence
  artificial DNA molecule for generation of DNA nanostructure
aggataaaaaagcaaagtttacccttgaatccctcattctgctcatttgccg

SEQ ID NO: 2103 - DNA, 48 bp, Artificial sequence
  artificial DNA molecule for generation of DNA nanostructure
gtgccgtaaagcactattaaaaggccggagacttctagctgataaatt

SEQ ID NO: 2104 - DNA, 46 bp, Artificial sequence
  artificial DNA molecule for generation of DNA nanostructure
gttttttggggaagaattaatgatgattgccctgttccagtttgga

SEQ ID NO: 2105 - DNA, 40 bp, Artificial sequence
  artificial DNA molecule for generation of DNA nanostructure
ttaacatccaataagcggtcaataacctgtttagctatat

SEQ ID NO: 2106 - DNA, 48 bp, Artificial sequence
  artificial DNA molecule for generation of DNA nanostructure
cgtggcgatcaaaagggtgagaatggggatgtttctccgtggtgaagg

SEQ ID NO: 2107 - DNA, 43 bp, Artificial sequence
  artificial DNA molecule for generation of DNA nanostructure
ggtgccggtgcctttttcctgcatcagaattctgcgaacgagt

SEQ ID NO: 2108 - DNA, 46 bp, Artificial sequence
  artificial DNA molecule for generation of DNA nanostructure
taaccaagcgcaacagcatcggccaacgcgcggtttttgagaggcg

SEQ ID NO: 2109 - DNA, 38 bp, Artificial sequence
  artificial DNA molecule for generation of DNA nanostructure
aaagggagcccccgtggcccgctttttttccagtcggg

SEQ ID NO: 2110 - DNA, 47 bp, Artificial sequence
  artificial DNA molecule for generation of DNA nanostructure
gggtcgagaaacctgtcgtgccagctaagggcgtcagcaagcgaaag

SEQ ID NO: 2111 - DNA, 40 bp, Artificial sequence
  artificial DNA molecule for generation of DNA nanostructure
cggtcacgttagaaccaaaacattagcctccggacttgta

SEQ ID NO: 2112 - DNA, 39 bp, Artificial sequence
  artificial DNA molecule for generation of DNA nanostructure
gcgaaaatcctttttgtttgatggtggccctgagagagt

SEQ ID NO: 2113 - DNA, 48 bp, Artificial sequence
  artificial DNA molecule for generation of DNA nanostructure
ggaaagccggcgaagtgtgaaattgttttttatccgctcagtaccgag

SEQ ID NO: 2114 - DNA, 39 bp, Artificial sequence
  artificial DNA molecule for generation of DNA nanostructure
tcgaattcgtacagaatgcgtttttcgggccgttttcac

SEQ ID NO: 2115 - DNA, 49 bp, Artificial sequence
  artificial DNA molecule for generation of DNA nanostructure
tgcgccaatttgtaccactcatataaatcatgtttaccagtttgtaaaa

SEQ ID NO: 2116 - DNA, 38 bp, Artificial sequence
  artificial DNA molecule for generation of DNA nanostructure
agtgtaggagcgggatgcaatgacggaaatttgaggga

SEQ ID NO: 2117 - DNA, 38 bp, Artificial sequence
  artificial DNA molecule for generation of DNA nanostructure
taaccctcgtttaccaaaaggaactttcgagtataaat

SEQ ID NO: 2118 - DNA, 40 bp, Artificial sequence
  artificial DNA molecule for generation of DNA nanostructure
aattagcagtactatggttgcggtgctgcggcatcatggt

SEQ ID NO: 2119 - DNA, 48 bp, Artificial sequence
  artificial DNA molecule for generation of DNA nanostructure
taaaggtgggcccactgaaagacaaaaattaaagaacgtggactccaa

SEQ ID NO: 2120 - DNA, 41 bp, Artificial sequence
  artificial DNA molecule for generation of DNA nanostructure
taggaactattttgtttttttaaatgctatttttgagagat

SEQ ID NO: 2121 - DNA, 50 bp, Artificial sequence
  artificial DNA molecule for generation of DNA nanostructure
gtcggtggtgccatcctagtgatgaagggtaaatttttttaaacgatgct

SEQ ID NO: 2122 - DNA, 38 bp, Artificial sequence
  artificial DNA molecule for generation of DNA nanostructure
cacaagctaaatcggttcttaaacgctggcaacaagag

SEQ ID NO: 2123 - DNA, 48 bp, Artificial sequence
  artificial DNA molecule for generation of DNA nanostructure
ggagcctttaattgtagttgcgccaacgcctgtcggcattttcgggcg

SEQ ID NO: 2124 - DNA, 40 bp, Artificial sequence
  artificial DNA molecule for generation of DNA nanostructure
tcaattctggggcgcgagctgaaaagacgacgataacgga

SEQ ID NO: 2125 - DNA, 46 bp, Artificial sequence
  artificial DNA molecule for generation of DNA nanostructure
atagttagtatcaccgaactgagtttcgtcaaaatcatagccccct

SEQ ID NO: 2126 - DNA, 48 bp, Artificial sequence
  artificial DNA molecule for generation of DNA nanostructure
tcgatagcccaccctcattaaagccagaatggccaagtgcccgtataa

SEQ ID NO: 2127 - DNA, 38 bp, Artificial sequence
  artificial DNA molecule for generation of DNA nanostructure
agcacgcgggagctaaacaggaggtttttcgattaaag

SEQ ID NO: 2128 - DNA, 50 bp, Artificial sequence
  artificial DNA molecule for generation of DNA nanostructure
agatttagtttttttgaccattagatacattagaatgccaacggcagcac

SEQ ID NO: 2129 - DNA, 48 bp, Artificial sequence
  artificial DNA molecule for generation of DNA nanostructure
cgtaacgacaaactacgacaatgagccgcttttgcgggatacgagggt

SEQ ID NO: 2130 - DNA, 48 bp, Artificial sequence
  artificial DNA molecule for generation of DNA nanostructure
gcgacagaccgtcaccgcgccaaagacaaaagggcgacatgaaccaga

SEQ ID NO: 2131 - DNA, 50 bp, Artificial sequence
  artificial DNA molecule for generation of DNA nanostructure
gtttttataatcagtgaggccagtgtcacttttttcgcgcctgtgcactc

SEQ ID NO: 2132 - DNA, 47 bp, Artificial sequence
  artificial DNA molecule for generation of DNA nanostructure
ataacgcctcgttagaaaatccctgtggctacagggcgcaaattaag

SEQ ID NO: 2133 - DNA, 40 bp, Artificial sequence
  artificial DNA molecule for generation of DNA nanostructure
gcgtggtgaggcaaaggtaatactcatccacacccgccgc

SEQ ID NO: 2134 - DNA, 39 bp, Artificial sequence
  artificial DNA molecule for generation of DNA nanostructure
cctcagagcataagatcagcttgttacgagggcagatac

SEQ ID NO: 2135 - DNA, 48 bp, Artificial sequence
  artificial DNA molecule for generation of DNA nanostructure
ccgttttttcgtctcgttgtgagagcaaggatgtaaagatgaaaggaa

SEQ ID NO: 2136 - DNA, 49 bp, Artificial sequence
  artificial DNA molecule for generation of DNA nanostructure
caaaagtcgcctgataacaactaatcatagtaagagactaaaggaattg

SEQ ID NO: 2137 - DNA, 48 bp, Artificial sequence
  artificial DNA molecule for generation of DNA nanostructure
ttccggcacatcgacatacctgcagccaatcatacaggcactggtctg

SEQ ID NO: 2138 - DNA, 40 bp, Artificial sequence
  artificial DNA molecule for generation of DNA nanostructure
gattgccggatagctctcacggaacgctattacgccagct

SEQ ID NO: 2139 - DNA, 39 bp, Artificial sequence
  artificial DNA molecule for generation of DNA nanostructure
tgcctttagcgttaacgctagggacgtgaaccgtctatc

SEQ ID NO: 2140 - DNA, 48 bp, Artificial sequence
  artificial DNA molecule for generation of DNA nanostructure
aatgccggggcgaaagcagctcattgggcggttgtcctttatttcaac

SEQ ID NO: 2141 - DNA, 46 bp, Artificial sequence
  artificial DNA molecule for generation of DNA nanostructure
gtaaaaaaagccgtggatcgttaacggcatcagattttttccgggt

SEQ ID NO: 2142 - DNA, 36 bp, Artificial sequence
  artificial DNA molecule for generation of DNA nanostructure
ccgcctggttccgaaatcggcaatcagagtataacg

SEQ ID NO: 2143 - DNA, 38 bp, Artificial sequence
  artificial DNA molecule for generation of DNA nanostructure
tcaaatagcccgagatagggttgagtgtttcagcttaa

SEQ ID NO: 2144 - DNA, 47 bp, Artificial sequence
  artificial DNA molecule for generation of DNA nanostructure
cagccctccactatcacaaaatagcgagaggcttttgcaaataggtg

SEQ ID NO: 2145 - DNA, 48 bp, Artificial sequence
  artificial DNA molecule for generation of DNA nanostructure
gatagactgctgcaaggcgattaattcaaccgagtcaaatcaccatca

SEQ ID NO: 2146 - DNA, 42 bp, Artificial sequence
  artificial DNA molecule for generation of DNA nanostructure
gaacgtcatttcatttactaatagtagtagcatgttttgacg

SEQ ID NO: 2147 - DNA, 31 bp, Artificial sequence
  artificial DNA molecule for generation of DNA nanostructure
tttcagactgtagcgtcagcagccagcttga

SEQ ID NO: 2148 - DNA, 44 bp, Artificial sequence
  artificial DNA molecule for generation of DNA nanostructure
gcagcaagcggttcttttcaccagtttttgagacggtgtttcct

SEQ ID NO: 2149 - DNA, 41 bp, Artificial sequence
  artificial DNA molecule for generation of DNA nanostructure
tccactcgaaagaggcagatttgtataccgatatcggttta

SEQ ID NO: 2150 - DNA, 48 bp, Artificial sequence
  artificial DNA molecule for generation of DNA nanostructure
agagggtatcgcattaaatttttgaatcggtttttaccctaacgttaa

SEQ ID NO: 2151 - DNA, 38 bp, Artificial sequence
  artificial DNA molecule for generation of DNA nanostructure
ccactacgaaggcaagacttttggctacagaggctttg

SEQ ID NO: 2152 - DNA, 38 bp, Artificial sequence
  artificial DNA molecule for generation of DNA nanostructure
cggaaccgcctcccttttaccagacttgagccatttgg

SEQ ID NO: 2153 - DNA, 45 bp, Artificial sequence
  artificial DNA molecule for generation of DNA nanostructure
tacaaagtgcggtttttcctcttaaagagtttttcgcagaaacag

SEQ ID NO: 2154 - DNA, 40 bp, Artificial sequence
  artificial DNA molecule for generation of DNA nanostructure
attttgtcacaatcaatagaaaattcatatggcagagccg

SEQ ID NO: 2155 - DNA, 47 bp, Artificial sequence
  artificial DNA molecule for generation of DNA nanostructure
gggaaggtatatgatagttgggtaatgtgtagaaaaatttctgcgcg

SEQ ID NO: 2156 - DNA, 48 bp, Artificial sequence
  artificial DNA molecule for generation of DNA nanostructure
tataagtatagcccggaaagaagtgagtgagaatagaaaggaacacaa

SEQ ID NO: 2157 - DNA, 46 bp, Artificial sequence
  artificial DNA molecule for generation of DNA nanostructure
taaaaaatttttatcccatttgcctttttccagcagttttttaacc

SEQ ID NO: 2158 - DNA, 48 bp, Artificial sequence
  artificial DNA molecule for generation of DNA nanostructure
tttgcgggagaaggtaaacgcggtgtcagcagcaaccgcatcgcaaat

SEQ ID NO: 2159 - DNA, 48 bp, Artificial sequence
  artificial DNA molecule for generation of DNA nanostructure
agcaccgtcagtctctgaatttactgccttgagtaacgtatctaaagt

SEQ ID NO: 2160 - DNA, 47 bp, Artificial sequence
  artificial DNA molecule for generation of DNA nanostructure
cgacggccagtgccaataacctcaaatcaccgtcaaccgatattcat

SEQ ID NO: 2161 - DNA, 46 bp, Artificial sequence
  artificial DNA molecule for generation of DNA nanostructure
cgaaaaaccatcacccaaatcaaaaatattgcctgagtaaaacgta

SEQ ID NO: 2162 - DNA, 48 bp, Artificial sequence
  artificial DNA molecule for generation of DNA nanostructure
agggcgataggactaaccaacctagcatcggacgtcaccccgttttca

SEQ ID NO: 2163 - DNA, 45 bp, Artificial sequence
  artificial DNA molecule for generation of DNA nanostructure
ctaacaactaatagatggcaaatctaagaacctcccgacttgcgg

SEQ ID NO: 2164 - DNA, 47 bp, Artificial sequence
  artificial DNA molecule for generation of DNA nanostructure
aaatagcagttaccagaagctaaaatatcttttaatggtactatatg

SEQ ID NO: 2165 - DNA, 48 bp, Artificial sequence
  artificial DNA molecule for generation of DNA nanostructure
gccaacgcccgaccgtacctaaattaggagcaatcaagaaaagcaaga

SEQ ID NO: 2166 - DNA, 39 bp, Artificial sequence
  artificial DNA molecule for generation of DNA nanostructure
tcaacagtagggcctgaccaacttcaggcgcagacaaga

SEQ ID NO: 2167 - DNA, 48 bp, Artificial sequence
  artificial DNA molecule for generation of DNA nanostructure
acgcaaagacaccacgtttttaataagtttgagccatttttcaccctc

SEQ ID NO: 2168 - DNA, 40 bp, Artificial sequence
  artificial DNA molecule for generation of DNA nanostructure
gtagaaaattattacgcagtatgtttcattacaatttcaa

SEQ ID NO: 2169 - DNA, 48 bp, Artificial sequence
  artificial DNA molecule for generation of DNA nanostructure
ccgaacgaaccaccagattaacaccgcctgcacatcaagattgaaata

SEQ ID NO: 2170 - DNA, 48 bp, Artificial sequence
  artificial DNA molecule for generation of DNA nanostructure
tgcgcgaactgatagcgtattagaggtcagtttagagccgcatattcc

SEQ ID NO: 2171 - DNA, 47 bp, Artificial sequence
  artificial DNA molecule for generation of DNA nanostructure
aacaatggttatataatgcgattgaattaattgagaatcgccatatt

SEQ ID NO: 2172 - DNA, 38 bp, Artificial sequence
  artificial DNA molecule for generation of DNA nanostructure
atacttctgaataagaatttgaattaccttttttaatg

SEQ ID NO: 2173 - DNA, 47 bp, Artificial sequence
  artificial DNA molecule for generation of DNA nanostructure
gaacctaccatatcaaaccagaaggagcggaaacaattcgacaactc

SEQ ID NO: 2174 - DNA, 50 bp, Artificial sequence
  artificial DNA molecule for generation of DNA nanostructure
aataagacaaggtctgaggggtaattctgaacaccctgaacatagaaaga

SEQ ID NO: 2175 - DNA, 48 bp, Artificial sequence
  artificial DNA molecule for generation of DNA nanostructure
tgaaagagctttaatcctggctcacgaacaaaatagctatcttaccga

SEQ ID NO: 2176 - DNA, 47 bp, Artificial sequence
  artificial DNA molecule for generation of DNA nanostructure
gaatacccgatggtttccaaatcaattaaacggaacggtgtacagac

SEQ ID NO: 2177 - DNA, 44 bp, Artificial sequence
  artificial DNA molecule for generation of DNA nanostructure
gacagattgacccccagtcataagggaaccttaagaaattgtga

SEQ ID NO: 2178 - DNA, 48 bp, Artificial sequence
  artificial DNA molecule for generation of DNA nanostructure
ccaccaccaaggccggatacatggcttttgatgatacagaaaagtaag

SEQ ID NO: 2179 - DNA, 38 bp, Artificial sequence
  artificial DNA molecule for generation of DNA nanostructure
ggtaaagttaaatgctaaatcataaattaatgagagat

SEQ ID NO: 2180 - DNA, 49 bp, Artificial sequence
  artificial DNA molecule for generation of DNA nanostructure
ttcagaaatacgttaataaaaaaaatctccaacataaccgttaaggagt

SEQ ID NO: 2181 - DNA, 44 bp, Artificial sequence
  artificial DNA molecule for generation of DNA nanostructure
aaaaaaggttttttccaaaacgaatattttttaattttttcacg

SEQ ID NO: 2182 - DNA, 37 bp, Artificial sequence
  artificial DNA molecule for generation of DNA nanostructure
ttgagatttaggaatttttaccacattattgtgtcga

SEQ ID NO: 2183 - DNA, 42 bp, Artificial sequence
  artificial DNA molecule for generation of DNA nanostructure
aagcgtcaaacgtcacctttttatgaaaccagccagcaaaat

SEQ ID NO: 2184 - DNA, 47 bp, Artificial sequence
  artificial DNA molecule for generation of DNA nanostructure
aattctgtccagaaggcgcagacggtcaacgaaaaggcttaggttgg

SEQ ID NO: 2185 - DNA, 48 bp, Artificial sequence
  artificial DNA molecule for generation of DNA nanostructure
cttgattttttttcacaaacaaataaatcctcagaaccgccaccctca

SEQ ID NO: 2186 - DNA, 45 bp, Artificial sequence
  artificial DNA molecule for generation of DNA nanostructure
ttataccctgctccatgttactttcatcagcaacattattacagg

SEQ ID NO: 2187 - DNA, 46 bp, Artificial sequence
  artificial DNA molecule for generation of DNA nanostructure
agagggttgaacagttaatgccccctgcctttttatttcggaacct

SEQ ID NO: 2188 - DNA, 48 bp, Artificial sequence
  artificial DNA molecule for generation of DNA nanostructure
tttgtcgtcttttttttcagactttaacgtttttggtcagcgttccag

SEQ ID NO: 2189 - DNA, 44 bp, Artificial sequence
  artificial DNA molecule for generation of DNA nanostructure
aatcagtaagcacgagaaacaccagaatttttgagtagtaaatt

SEQ ID NO: 2190 - DNA, 45 bp, Artificial sequence
  artificial DNA molecule for generation of DNA nanostructure
tagccggatttttaacctccatcacgagaatgaccaaagcccaat

SEQ ID NO: 2191 - DNA, 49 bp, Artificial sequence
  artificial DNA molecule for generation of DNA nanostructure
atccgcgacaagcgcgaaactttttaagtacaacggaaaagaatacact

SEQ ID NO: 2192 - DNA, 48 bp, Artificial sequence
  artificial DNA molecule for generation of DNA nanostructure
agaattgaaagtcagaagactaccacgcgacgacaataaacaacatgt

SEQ ID NO: 2193 - DNA, 48 bp, Artificial sequence
  artificial DNA molecule for generation of DNA nanostructure
attattctaggtcagacgattggcagagccgccaccagaataaaagaa

SEQ ID NO: 2194 - DNA, 44 bp, Artificial sequence
  artificial DNA molecule for generation of DNA nanostructure
agaattaagagcgctaataattaattttccctaatagtgatgca

SEQ ID NO: 2195 - DNA, 48 bp, Artificial sequence
  artificial DNA molecule for generation of DNA nanostructure
aagctgctatttgattaagactcctacatacataaaggtggcaacata

SEQ ID NO: 2196 - DNA, 43 bp, Artificial sequence
  artificial DNA molecule for generation of DNA nanostructure
accagtagcaccattacccattcatttttgtgaatgaattaga

SEQ ID NO: 2197 - DNA, 38 bp, Artificial sequence
  artificial DNA molecule for generation of DNA nanostructure
accgaggggtcagtcagaagataaaacagatagcaaac

SEQ ID NO: 2198 - DNA, 44 bp, Artificial sequence
  artificial DNA molecule for generation of DNA nanostructure
aaggcttgccctgaactcatgagtttttaagtttccacgtaaca

SEQ ID NO: 2199 - DNA, 40 bp, Artificial sequence
  artificial DNA molecule for generation of DNA nanostructure
accggataggtgaggcaaacgcaataataacgcagatagc

SEQ ID NO: 2200 - DNA, 48 bp, Artificial sequence
  artificial DNA molecule for generation of DNA nanostructure
atcttctggtgataaaaacagttgacgctgagatcgccattaaaaata

SEQ ID NO: 2201 - DNA, 48 bp, Artificial sequence
  artificial DNA molecule for generation of DNA nanostructure
tgaggcttgcatttttggagttaaagcaacaaccttttttcgcccacg

SEQ ID NO: 2202 - DNA, 39 bp, Artificial sequence
  artificial DNA molecule for generation of DNA nanostructure
ttataccagtcagtatctcatcttggtaaaatacgtaat

SEQ ID NO: 2203 - DNA, 39 bp, Artificial sequence
  artificial DNA molecule for generation of DNA nanostructure
gtactggaaagtattgattagcggggttttggtccaata

SEQ ID NO: 2204 - DNA, 50 bp, Artificial sequence
  artificial DNA molecule for generation of DNA nanostructure
aggttatgaaattaccttgtaatctttaggctggctgaccttcaccggaa

SEQ ID NO: 2205 - DNA, 38 bp, Artificial sequence
  artificial DNA molecule for generation of DNA nanostructure
tgactattatagtcagaagcaaagcggattaacccaca

SEQ ID NO: 2206 - DNA, 43 bp, Artificial sequence
  artificial DNA molecule for generation of DNA nanostructure
cattagacgggtcagctaaatttatcagatgcaaaaaacaaac

SEQ ID NO: 2207 - DNA, 48 bp, Artificial sequence
  artificial DNA molecule for generation of DNA nanostructure
gtttaaatcaaaaatcaggtcaatccccctcattgcgaactaacggaa

SEQ ID NO: 2208 - DNA, 38 bp, Artificial sequence
  artificial DNA molecule for generation of DNA nanostructure
gttaaataagaataaaacagtgccaaaggaattgagga

SEQ ID NO: 2209 - DNA, 49 bp, Artificial sequence
  artificial DNA molecule for generation of DNA nanostructure
tgtttagactggatagcctcagtaccaggcggataattttttgccgtcg

SEQ ID NO: 2210 - DNA, 48 bp, Artificial sequence
  artificial DNA molecule for generation of DNA nanostructure
cccgaaagttctgtaaatcgtcgctattatcatacatttaacaatttc

SEQ ID NO: 2211 - DNA, 50 bp, Artificial sequence
  artificial DNA molecule for generation of DNA nanostructure
aatatgggattttgctctgcggaatcgtcataaatattcattgtttaccc

SEQ ID NO: 2212 - DNA, 52 bp, Artificial sequence
  artificial DNA molecule for generation of DNA nanostructure
aaacaactttcatttttcagtttcagcgtttgccagagggggtaatagtaaa

SEQ ID NO: 2213 - DNA, 44 bp, Artificial sequence
  artificial DNA molecule for generation of DNA nanostructure
aataacgggaccggaaatatatgtgagtttttgaataaccttgc

SEQ ID NO: 2214 - DNA, 42 bp, Artificial sequence
  artificial DNA molecule for generation of DNA nanostructure
cacgcaaccagcttacgattcccacgatccagcgcaccgagt

SEQ ID NO: 2215 - DNA, 46 bp, Artificial sequence
  artificial DNA molecule for generation of DNA nanostructure
acttcaaatatcgcgttttaattcgtttttgcttcaaagcgaacca

SEQ ID NO: 2216 - DNA, 47 bp, Artificial sequence
  artificial DNA molecule for generation of DNA nanostructure
gtttgcgcgctcactagctaactcacattaaggaagattgtagccag

SEQ ID NO: 2217 - DNA, 39 bp, Artificial sequence
  artificial DNA molecule for generation of DNA nanostructure
ggtcatacagttgaggttctttgccccgtcggcaggaag

SEQ ID NO: 2218 - DNA, 42 bp, Artificial sequence
  artificial DNA molecule for generation of DNA nanostructure
agaatacgtggcacagacaatatttttttttgaatggtatta

SEQ ID NO: 2219 - DNA, 37 bp, Artificial sequence
  artificial DNA molecule for generation of DNA nanostructure
tgaaaacatagcgcaggattagagagtcagcaaactc

SEQ ID NO: 2220 - DNA, 50 bp, Artificial sequence
  artificial DNA molecule for generation of DNA nanostructure
acttcttatctctgccagtgagaagtgacaggaacggtacgctacagaga

SEQ ID NO: 2221 - DNA, 48 bp, Artificial sequence
  artificial DNA molecule for generation of DNA nanostructure
gcagccttcgttggcttagagcttttttaaatatgcaactaaagtacg

SEQ ID NO: 2222 - DNA, 40 bp, Artificial sequence
  artificial DNA molecule for generation of DNA nanostructure
cagagatataataaaagggacattaagcaaatttgctatt

SEQ ID NO: 2223 - DNA, 47 bp, Artificial sequence
  artificial DNA molecule for generation of DNA nanostructure
aattgctgaatataatatataacgtcaaaaattaaaaacagggaagc

SEQ ID NO: 2224 - DNA, 47 bp, Artificial sequence
  artificial DNA molecule for generation of DNA nanostructure
aagtttcattccatataacagttggctggagttcagcaagtaaaggt

SEQ ID NO: 2225 - DNA, 37 bp, Artificial sequence
  artificial DNA molecule for generation of DNA nanostructure
aaaagactggtgtggtgtccagttgccctgcggctgg

SEQ ID NO: 2226 - DNA, 40 bp, Artificial sequence
  artificial DNA molecule for generation of DNA nanostructure
aaaacagattatcattttgcggaattgcccgaacgttatt

SEQ ID NO: 2227 - DNA, 40 bp, Artificial sequence
  artificial DNA molecule for generation of DNA nanostructure
cggatcaatgggaagggcgatcgggctatcaggtcattgc

SEQ ID NO: 2228 - DNA, 43 bp, Artificial sequence
  artificial DNA molecule for generation of DNA nanostructure
attgaccgattctccgcgcgtctgtgagatttagagcttgacg

SEQ ID NO: 2229 - DNA, 40 bp, Artificial sequence
  artificial DNA molecule for generation of DNA nanostructure
gcgccatatgggcgcatcgtaaccgtgcgaaacctttcat

SEQ ID NO: 2230 - DNA, 38 bp, Artificial sequence
  artificial DNA molecule for generation of DNA nanostructure
atcctcaaatttttgaaaccaattttttttttgcacgt

SEQ ID NO: 2231 - DNA, 40 bp, Artificial sequence
  artificial DNA molecule for generation of DNA nanostructure
tgcaggcgctttcgcactcaatatacagtaactcaacatg

SEQ ID NO: 2232 - DNA, 50 bp, Artificial sequence
  artificial DNA molecule for generation of DNA nanostructure
gctattagcctttttttctgaacctccagattcaccagtcacggattatt

SEQ ID NO: 2233 - DNA, 47 bp, Artificial sequence
  artificial DNA molecule for generation of DNA nanostructure
catcagcggggtcatgtgtctggcatcacgcaaattaaccagaatcc

SEQ ID NO: 2234 - DNA, 40 bp, Artificial sequence
  artificial DNA molecule for generation of DNA nanostructure
attcgcctgattgcttttttttaataccaagttacaaaat

SEQ ID NO: 2235 - DNA, 48 bp, Artificial sequence
  artificial DNA molecule for generation of DNA nanostructure
tattgggcagcctgggacgagccgagtaacaatcgtcataggtcactg

SEQ ID NO: 2236 - DNA, 40 bp, Artificial sequence
  artificial DNA molecule for generation of DNA nanostructure
atccccggcaattccacacaacatgtgcctaagccttcct

SEQ ID NO: 2237 - DNA, 47 bp, Artificial sequence
  artificial DNA molecule for generation of DNA nanostructure
agatgatgtccaatcgttaatttcccaacatttttttaatttaggca

SEQ ID NO: 2238 - DNA, 39 bp, Artificial sequence
  artificial DNA molecule for generation of DNA nanostructure
gcctctttccttatcattccaagagaacaagcaccgcgc

SEQ ID NO: 2239 - DNA, 46 bp, Artificial sequence
  artificial DNA molecule for generation of DNA nanostructure
taaaccaagaggcattttctgtagaaaccaattaccaacagctaca

SEQ ID NO: 2240 - DNA, 43 bp, Artificial sequence
  artificial DNA molecule for generation of DNA nanostructure
tatgcgttatacatttttattcttaccagtataaatcataatt

SEQ ID NO: 2241 - DNA, 38 bp, Artificial sequence
  artificial DNA molecule for generation of DNA nanostructure
ccacgctgctcctcaccgggggttccttacagtctgtc

SEQ ID NO: 2242 - DNA, 32 bp, Artificial sequence
  artificial DNA molecule for generation of DNA nanostructure
tacattgggcaattcatcagtaatatccagaa

SEQ ID NO: 2243 - DNA, 45 bp, Artificial sequence
  artificial DNA molecule for generation of DNA nanostructure
ataagtccccttccaaataagaatcatttttgcggatgtagcaat

SEQ ID NO: 2244 - DNA, 44 bp, Artificial sequence
  artificial DNA molecule for generation of DNA nanostructure
gatgatgaaatatcatttttaccctcaataagcatcatctttaa

SEQ ID NO: 2245 - DNA, 47 bp, Artificial sequence
  artificial DNA molecule for generation of DNA nanostructure
caatattactcaatcgaagattagcagatataagtatcagtaccgca

SEQ ID NO: 2246 - DNA, 47 bp, Artificial sequence
  artificial DNA molecule for generation of DNA nanostructure
aacgcgccttaagagaatattttttaagtaccgacaaaataacaacg

SEQ ID NO: 2247 - DNA, 49 bp, Artificial sequence
  artificial DNA molecule for generation of DNA nanostructure
acgtcagattagaagaaataagaggacgattttttgttgcttagattaa

SEQ ID NO: 2248 - DNA, 50 bp, Artificial sequence
  artificial DNA molecule for generation of DNA nanostructure
aaacagtacataaatacctttaattgcttacatcgagattttcaggttta

SEQ ID NO: 2249 - DNA, 48 bp, Artificial sequence
  artificial DNA molecule for generation of DNA nanostructure
ctgagagtctggagcacaggctgcaaataatttgggaacattctgctc

SEQ ID NO: 2250 - DNA, 40 bp, Artificial sequence
  artificial DNA molecule for generation of DNA nanostructure
caacaggtgctgtagcagtacctttccttttgctcaaact

SEQ ID NO: 2251 - DNA, 40 bp, Artificial sequence
  artificial DNA molecule for generation of DNA nanostructure
cacgcgtgtgaacaagaaaaatgccccagcagggatttta

SEQ ID NO: 2252 - DNA, 31 bp, Artificial sequence
  artificial DNA molecule for generation of DNA nanostructure
tttagcggcactagaaaatttttgcctgttt

SEQ ID NO: 2253 - DNA, 40 bp, Artificial sequence
  artificial DNA molecule for generation of DNA nanostructure
cttcgcgtctgaatctcaataatcggctgagggtggtttt

SEQ ID NO: 2254 - DNA, 40 bp, Artificial sequence
  artificial DNA molecule for generation of DNA nanostructure
ctcatcgaacgggtatttgcacccgctaacgacattgcaa

SEQ ID NO: 2255 - DNA, 40 bp, Artificial sequence
  artificial DNA molecule for generation of DNA nanostructure
aaataaacccagagcctaatttgccttaaatctctgaaat

SEQ ID NO: 2256 - DNA, 38 bp, Artificial sequence
  artificial DNA molecule for generation of DNA nanostructure
atggaaataatcaggtcaatcatatgtaccctggccaa

SEQ ID NO: 2257 - DNA, 49 bp, Artificial sequence
  artificial DNA molecule for generation of DNA nanostructure
caacatctcattttatcgaatcattaagccgtttttattttttgcgttg

SEQ ID NO: 2258 - DNA, 48 bp, Artificial sequence
  artificial DNA molecule for generation of DNA nanostructure
gccatcaagcaactgtacttaaataacggcggtaacacaggcggcctt

SEQ ID NO: 2259 - DNA, 46 bp, Artificial sequence
  artificial DNA molecule for generation of DNA nanostructure
tatttatcccaagttacatcactcaggaaaaacgtaaatgtgagcg

SEQ ID NO: 2260 - DNA, 45 bp, Artificial sequence
  artificial DNA molecule for generation of DNA nanostructure
agccatatccagtaagtttatcaacaataggaataacagaaaata

SEQ ID NO: 2261 - DNA, 48 bp, Artificial sequence
  artificial DNA molecule for generation of DNA nanostructure
gaagcataccgtgagcgtttaatatcccatcctaatttacgagcagag

SEQ ID NO: 2262 - DNA, 37 bp, Artificial sequence
  artificial DNA molecule for generation of DNA nanostructure
acgcgagaagacgctgtttttgaagagtctagaatcc

SEQ ID NO: 2263 - DNA, 40 bp, Artificial sequence
  artificial DNA molecule for generation of DNA nanostructure
cagttacaatcggccttgctgataaattgcgtggagaaac

SEQ ID NO: 2264 - DNA, 48 bp, Artificial sequence
  artificial DNA molecule for generation of DNA nanostructure
ccaatagcccggttgatacctacattttgacgccgccagcgcgtcttt

SEQ ID NO: 2265 - DNA, 40 bp, Artificial sequence
  artificial DNA molecule for generation of DNA nanostructure
gaaggcttatccggtattcttttttagaacgcaaaatcta

SEQ ID NO: 2266 - DNA, 48 bp, Artificial sequence
  artificial DNA molecule for generation of DNA nanostructure
aggttttgaagcaactttttcatttttatatattttagcaagacaaag

SEQ ID NO: 2267 - DNA, 40 bp, Artificial sequence
  artificial DNA molecule for generation of DNA nanostructure
aattatcaatcaagttgccaccactattagcgaggtggag

SEQ ID NO: 2268 - DNA, 40 bp, Artificial sequence
  artificial DNA molecule for generation of DNA nanostructure
ccgccacgggaacggagctttcagtttgccatgtaccgcc

SEQ ID NO: 2269 - DNA, 48 bp, Artificial sequence
  artificial DNA molecule for generation of DNA nanostructure
tgctttccaggtggcacaataaagacgtgccggccagagcgagccacc

SEQ ID NO: 2270 - DNA, 37 bp, Artificial sequence
  artificial DNA molecule for generation of DNA nanostructure
cccagtcacgacgcccggaattcgctggcatgaccct

SEQ ID NO: 2271 - DNA, 42 bp, Artificial sequence
  artificial DNA molecule for generation of DNA nanostructure
tagcattcaccctcagtactcagcccaataggaacccatgta

SEQ ID NO: 2272 - DNA, 38 bp, Artificial sequence
  artificial DNA molecule for generation of DNA nanostructure
cagcgccaaccggaaacaatcggcgacgccagggtttt

SEQ ID NO: 2273 - DNA, 51 bp, Artificial sequence
  artificial DNA molecule for generation of DNA nanostructure
ccgtaacaccgccaccctcagaaccgcatagcaaggaggtttaataaaaac

SEQ ID NO: 2274 - DNA, 40 bp, Artificial sequence
  artificial DNA molecule for generation of DNA nanostructure
accctcattttcagggcaccctcaacatcctccttttcat

SEQ ID NO: 2275 - DNA, 40 bp, Artificial sequence
  artificial DNA molecule for generation of DNA nanostructure
atgaattttctgtgctaggattagaagaggctgagactcc

SEQ ID NO: 2276 - DNA, 42 bp, Artificial sequence
  artificial DNA molecule for generation of DNA nanostructure
caatatctctttacaattatcattcaatagataatacatttg

SEQ ID NO: 2277 - DNA, 40 bp, Artificial sequence
  artificial DNA molecule for generation of DNA nanostructure
tcaagagattaaacagagccctttatagacgttgggaaga

SEQ ID NO: 2278 - DNA, 50 bp, Artificial sequence
  artificial DNA molecule for generation of DNA nanostructure
aaacatcggtcgcgggcttgaaaaagaactggcaagcagagccgccgcca

SEQ ID NO: 2279 - DNA, 34 bp, Artificial sequence
  artificial DNA molecule for generation of DNA nanostructure
gcatcaaaaagattaagaggaagtattcatttca

SEQ ID NO: 2280 - DNA, 42 bp, Artificial sequence
  artificial DNA molecule for generation of DNA nanostructure
aggatttagaacctaaaacagccagcagcaaatgagaggcgt

SEQ ID NO: 2281 - DNA, 45 bp, Artificial sequence
  artificial DNA molecule for generation of DNA nanostructure
gcattgacaggaggttgaggcgaaacatgtaataagtgttagtaa

SEQ ID NO: 2282 - DNA, 41 bp, Artificial sequence
  artificial DNA molecule for generation of DNA nanostructure
attacctgagcaaaatggaagggttacgcgcagaggcgaat

SEQ ID NO: 2283 - DNA, 44 bp, Artificial sequence
  artificial DNA molecule for generation of DNA nanostructure
gtttgaggggacgccagccagatgagccgaactgattagtaata

SEQ ID NO: 2284 - DNA, 51 bp, Artificial sequence
  artificial DNA molecule for generation of DNA nanostructure
tttgagtaacaaataaagataatcctgattgtttttttggatttgattatc

SEQ ID NO: 2285 - DNA, 45 bp, Artificial sequence
  artificial DNA molecule for generation of DNA nanostructure
caggcaaaatcgcactacgacagtatcggccttaatgggataggt

SEQ ID NO: 2286 - DNA, 51 bp, Artificial sequence
  artificial DNA molecule for generation of DNA nanostructure
cgcttctggtgactagcataaaagccccaaaaacacatcgtagaagtgtaa

SEQ ID NO: 2287 - DNA, 44 bp, Artificial sequence
  artificial DNA molecule for generation of DNA nanostructure
cacgttggtgtagtcgccattaacaagaaaatatttaaattgta

SEQ ID NO: 2288 - DNA, 43 bp, Artificial sequence
  artificial DNA molecule for generation of DNA nanostructure
acgaccaggaacccttctgacctgaaagcgtaaattttaaaag

SEQ ID NO: 2289 - DNA, 43 bp, Artificial sequence
  artificial DNA molecule for generation of DNA nanostructure
gtataagcgaatcgatgaacggtaatcgtaaaccgatctgcca

SEQ ID NO: 2290 - DNA, 43 bp, Artificial sequence
  artificial DNA molecule for generation of DNA nanostructure
tgcctgaggaatccgccgggcgcggttgcggtctttccggcac

SEQ ID NO: 2291 - DNA, 40 bp, Artificial sequence
  artificial DNA molecule for generation of DNA nanostructure
ctgattgcaagcggtctaagaatacgtggaaaggaaggtt

SEQ ID NO: 2292 - DNA, 40 bp, Artificial sequence
  artificial DNA molecule for generation of DNA nanostructure
tttcaccatttacattggtttttagattcacccggtttgc

SEQ ID NO: 2293 - DNA, 46 bp, Artificial sequence
  artificial DNA molecule for generation of DNA nanostructure
cgcctttttgggtgcctgtcgtccacacaacatacgagagtttttt

SEQ ID NO: 2294 - DNA, 48 bp, Artificial sequence
  artificial DNA molecule for generation of DNA nanostructure
agcggtgcagtcacactccagaacattttttattaccgccagccattg

SEQ ID NO: 2295 - DNA, 40 bp, Artificial sequence
  artificial DNA molecule for generation of DNA nanostructure
gagtgttgggggtcgaggtgccgtaaagcactaaatcgga

SEQ ID NO: 2296 - DNA, 40 bp, Artificial sequence
  artificial DNA molecule for generation of DNA nanostructure
acacgttaacggcatcaataaccttgcttttttctgtaaa

SEQ ID NO: 2297 - DNA, 53 bp, Artificial sequence
  artificial DNA molecule for generation of DNA nanostructure
gcaacatcagttgacattattgaacgagtagtaaattttaattcgggggtaat

SEQ ID NO: 2298 - DNA, 48 bp, Artificial sequence
  artificial DNA molecule for generation of DNA nanostructure
tattaaagctacgtgaaccatcacccaaatcaccggaagcagcaggcg

SEQ ID NO: 2299 - DNA, 40 bp, Artificial sequence
  artificial DNA molecule for generation of DNA nanostructure
aagggataggcaacagttgcgctctaaagcctggggtgcc

SEQ ID NO: 2300 - DNA, 44 bp, Artificial sequence
  artificial DNA molecule for generation of DNA nanostructure
tttgccatcaacatgttttaaaacaccaacaggtagttacttag

SEQ ID NO: 2301 - DNA, 40 bp, Artificial sequence
  artificial DNA molecule for generation of DNA nanostructure
gctctcacggcggttggcagcaaccgcaagaactttttta

SEQ ID NO: 2302 - DNA, 38 bp, Artificial sequence
  artificial DNA molecule for generation of DNA nanostructure
ccgtggtgcaacaggacgctcaatagttggcatctaaa

SEQ ID NO: 2303 - DNA, 40 bp, Artificial sequence
  artificial DNA molecule for generation of DNA nanostructure
atggcccaaacgtggactccaacgcagcacagacaatatt

SEQ ID NO: 2304 - DNA, 38 bp, Artificial sequence
  artificial DNA molecule for generation of DNA nanostructure
aaaatcccgactttctccttagaaatcacttatacttc

SEQ ID NO: 2305 - DNA, 50 bp, Artificial sequence
  artificial DNA molecule for generation of DNA nanostructure
ttccagtttggaacaatctttaattagaaccctaacaactttttaataga

SEQ ID NO: 2306 - DNA, 39 bp, Artificial sequence
  artificial DNA molecule for generation of DNA nanostructure
cgaccttttgataagaggtcattcatgtcaaataagcaa

SEQ ID NO: 2307 - DNA, 38 bp, Artificial sequence
  artificial DNA molecule for generation of DNA nanostructure
tgctgaatagagaatctgcctgaggagtaacatgttaa

SEQ ID NO: 2308 - DNA, 48 bp, Artificial sequence
  artificial DNA molecule for generation of DNA nanostructure
tcaaaagaatagtttttccgagatagggttgtggttttttccgaaatc

SEQ ID NO: 2309 - DNA, 40 bp, Artificial sequence
  artificial DNA molecule for generation of DNA nanostructure
tttgaatggctattaggagtccactttgccccataaagtg

SEQ ID NO: 2310 - DNA, 41 bp, Artificial sequence
  artificial DNA molecule for generation of DNA nanostructure
attgcctgagagtctggagcaaacaataatgctgtagcgag

SEQ ID NO: 2311 - DNA, 38 bp, Artificial sequence
  artificial DNA molecule for generation of DNA nanostructure
aaggcgattaagttcagcgcattaaattttacccgtcg

SEQ ID NO: 2312 - DNA, 44 bp, Artificial sequence
  artificial DNA molecule for generation of DNA nanostructure
tcgtcgtatgttttttagtgtgtccatcacgcacggaccgagta

SEQ ID NO: 2313 - DNA, 48 bp, Artificial sequence
  artificial DNA molecule for generation of DNA nanostructure
cgttaatagatgaacggtaatcgtaaaactagtttgcggatggaagtt

SEQ ID NO: 2314 - DNA, 50 bp, Artificial sequence
  artificial DNA molecule for generation of DNA nanostructure
ataaaagggacattctgtttttccaacagagagcgcgaactgatagccct

SEQ ID NO: 2315 - DNA, 40 bp, Artificial sequence
  artificial DNA molecule for generation of DNA nanostructure
atacctagcctggccgagagatagtaaaaaaaaaagaacg

SEQ ID NO: 2316 - DNA, 42 bp, Artificial sequence
  artificial DNA molecule for generation of DNA nanostructure
gacgacagctttccggcaccgtaacgccaaaggaaagataca

SEQ ID NO: 2317 - DNA, 48 bp, Artificial sequence
  artificial DNA molecule for generation of DNA nanostructure
atcgcactgaatttgtccaattctactgaccaactttctaactcacat

SEQ ID NO: 2318 - DNA, 48 bp, Artificial sequence
  artificial DNA molecule for generation of DNA nanostructure
cctcagagttttgttaaaatttttattgtaaaacggtgtctggcttag

SEQ ID NO: 2319 - DNA, 47 bp, Artificial sequence
  artificial DNA molecule for generation of DNA nanostructure
aatttatctttagtgagtcacctgtttagctcacgacgtggtggagc

SEQ ID NO: 2320 - DNA, 40 bp, Artificial sequence
  artificial DNA molecule for generation of DNA nanostructure
atggaaacagtacatattagattaggtgctggtaattttc

SEQ ID NO: 2321 - DNA, 39 bp, Artificial sequence
  artificial DNA molecule for generation of DNA nanostructure
aaatcaacagttgaaaagggttagcatggaagtaataac

SEQ ID NO: 2322 - DNA, 31 bp, Artificial sequence
  artificial DNA molecule for generation of DNA nanostructure
ataggtcatcaggaagaaacagggttgattc

SEQ ID NO: 2323 - DNA, 48 bp, Artificial sequence
  artificial DNA molecule for generation of DNA nanostructure
tttgattagtgccaagcgaaacgtacagcttgagaagagtcaatagtg

SEQ ID NO: 2324 - DNA, 45 bp, Artificial sequence
  artificial DNA molecule for generation of DNA nanostructure
gcgaacgtataacaaagattgttcatatgtaccccggttgataat

SEQ ID NO: 2325 - DNA, 50 bp, Artificial sequence
  artificial DNA molecule for generation of DNA nanostructure
agaaacaataaaattaatttttcgttgtagcagcctgagtagaagaactc

SEQ ID NO: 2326 - DNA, 48 bp, Artificial sequence
  artificial DNA molecule for generation of DNA nanostructure
aaaacactgcgaaacaaagtacaaccggaacgcgcgacctactaaagt

SEQ ID NO: 2327 - DNA, 44 bp, Artificial sequence
  artificial DNA molecule for generation of DNA nanostructure
tgccaacgtttttcagcaccgatcaaacttaaatttaatcggcc

SEQ ID NO: 2328 - DNA, 40 bp, Artificial sequence
  artificial DNA molecule for generation of DNA nanostructure
aatcctgattgttttttttgattataatatcaaaattatt

SEQ ID NO: 2329 - DNA, 47 bp, Artificial sequence
  artificial DNA molecule for generation of DNA nanostructure
ccaacaggtcaggattagagagtgtacagactcattccaagtagatt

SEQ ID NO: 2330 - DNA, 36 bp, Artificial sequence
  artificial DNA molecule for generation of DNA nanostructure
ttatccgctcacaattgccagctgtttttattaatg

SEQ ID NO: 2331 - DNA, 39 bp, Artificial sequence
  artificial DNA molecule for generation of DNA nanostructure
aacctacccttctgaataatggacattcgccgacggcca

SEQ ID NO: 2332 - DNA, 52 bp, Artificial sequence
  artificial DNA molecule for generation of DNA nanostructure
tctatcagggcgtaatgagtgttgcagcccttcacccattttgaaaaacgct

SEQ ID NO: 2333 - DNA, 39 bp, Artificial sequence
  artificial DNA molecule for generation of DNA nanostructure
aatcaatatctggtccgtctgaatgaaagcgcacgctgg

SEQ ID NO: 2334 - DNA, 38 bp, Artificial sequence
  artificial DNA molecule for generation of DNA nanostructure
aggcgcatagataaggcttgccagcaaactagcttaat

SEQ ID NO: 2335 - DNA, 47 bp, Artificial sequence
  artificial DNA molecule for generation of DNA nanostructure
cggagatttgtattacacgaaagaggcaaaagacctccggcttaggt

SEQ ID NO: 2336 - DNA, 39 bp, Artificial sequence
  artificial DNA molecule for generation of DNA nanostructure
gcgattataaatggtcaataccgccagccagtatcggcc

SEQ ID NO: 2337 - DNA, 48 bp, Artificial sequence
  artificial DNA molecule for generation of DNA nanostructure
ctgctcatttgccgcctcgggaaagtttttctaaaatcctgtttgatg

SEQ ID NO: 2338 - DNA, 40 bp, Artificial sequence
  artificial DNA molecule for generation of DNA nanostructure
agcttcaaagcgaaccagaccggactgacgagaatatgca

SEQ ID NO: 2339 - DNA, 37 bp, Artificial sequence
  artificial DNA molecule for generation of DNA nanostructure
actgcccgctttccagagcagttgggaaaaagagacg

SEQ ID NO: 2340 - DNA, 40 bp, Artificial sequence
  artificial DNA molecule for generation of DNA nanostructure
cgttggtggattgaccgtaatgggggaattgaagccccaa

SEQ ID NO: 2341 - DNA, 40 bp, Artificial sequence
  artificial DNA molecule for generation of DNA nanostructure
atatctttaggagcacttctgaccatggattagtgagacg

SEQ ID NO: 2342 - DNA, 48 bp, Artificial sequence
  artificial DNA molecule for generation of DNA nanostructure
aaacggcgtagaccgtgcatctgcgggcttctggtgccggtgcgcaac

SEQ ID NO: 2343 - DNA, 38 bp, Artificial sequence
  artificial DNA molecule for generation of DNA nanostructure
cgaaagacttcaaatatcgcgttgggcttgagatggtt

SEQ ID NO: 2344 - DNA, 40 bp, Artificial sequence
  artificial DNA molecule for generation of DNA nanostructure
caggcgcagacggtcaaacgtaactggcagcctccggcca

SEQ ID NO: 2345 - DNA, 48 bp, Artificial sequence
  artificial DNA molecule for generation of DNA nanostructure
gattctccgtgggaacatatttaagaggggactagtttgaccattatc

SEQ ID NO: 2346 - DNA, 38 bp, Artificial sequence
  artificial DNA molecule for generation of DNA nanostructure
gacaaaagagttttaaccaccagaggtttagttaggat

SEQ ID NO: 2347 - DNA, 50 bp, Artificial sequence
  artificial DNA molecule for generation of DNA nanostructure
cccaataggaacccatgtagctaaacaaccaccctatctaaagccctgcc

SEQ ID NO: 2348 - DNA, 32 bp, Artificial sequence
  artificial DNA molecule for generation of DNA nanostructure
tttcgtcaccagtcattttcagggatagcaag

SEQ ID NO: 2349 - DNA, 40 bp, Artificial sequence
  artificial DNA molecule for generation of DNA nanostructure
gaataagtttattcgagaatgaccataaatcaaaaatcag

SEQ ID NO: 2350 - DNA, 40 bp, Artificial sequence
  artificial DNA molecule for generation of DNA nanostructure
tagaaaatacatacataaaggtgggtattctagaaggtaa

SEQ ID NO: 2351 - DNA, 38 bp, Artificial sequence
  artificial DNA molecule for generation of DNA nanostructure
atttcaacaccaatattcctgtagccagctttcatcaa

SEQ ID NO: 2352 - DNA, 38 bp, Artificial sequence
  artificial DNA molecule for generation of DNA nanostructure
gactccttattacgcagtatgttctcccgacttgcggg

SEQ ID NO: 2353 - DNA, 40 bp, Artificial sequence
  artificial DNA molecule for generation of DNA nanostructure
gcgtaacgacaaactacgccaccctcagagcctaattcgc

SEQ ID NO: 2354 - DNA, 46 bp, Artificial sequence
  artificial DNA molecule for generation of DNA nanostructure
agatttttttaggaaatctacgattgtgaattaccttaagaagcaa

SEQ ID NO: 2355 - DNA, 47 bp, Artificial sequence
  artificial DNA molecule for generation of DNA nanostructure
gtcaccgaaaattgtcacaatcaatagaaaatgcccgtaaacctatt

SEQ ID NO: 2356 - DNA, 40 bp, Artificial sequence
  artificial DNA molecule for generation of DNA nanostructure
ttcaactattagaacccttttttatatattttaaagattc

SEQ ID NO: 2357 - DNA, 48 bp, Artificial sequence
  artificial DNA molecule for generation of DNA nanostructure
gctccatgaaatgcaacataaagcttttttaatcggttgtaccaaaaa

SEQ ID NO: 2358 - DNA, 41 bp, Artificial sequence
  artificial DNA molecule for generation of DNA nanostructure
aggtgaataattagagcatagttagacgttagtaaatttta

SEQ ID NO: 2359 - DNA, 38 bp, Artificial sequence
  artificial DNA molecule for generation of DNA nanostructure
cctcagaaccgccaccattctgaaacagccctccagca

SEQ ID NO: 2360 - DNA, 48 bp, Artificial sequence
  artificial DNA molecule for generation of DNA nanostructure
ctcagaaccaacgcctgtagcattgccgaattttctgtatgcggagtg

SEQ ID NO: 2361 - DNA, 44 bp, Artificial sequence
  artificial DNA molecule for generation of DNA nanostructure
ggtaattcgattgagggaggagaacgcgtgccagtttttttatt

SEQ ID NO: 2362 - DNA, 36 bp, Artificial sequence
  artificial DNA molecule for generation of DNA nanostructure
aatttcaactttaatcttaataaatttttcgaacta

SEQ ID NO: 2363 - DNA, 38 bp, Artificial sequence
  artificial DNA molecule for generation of DNA nanostructure
tatcacctatttcggtaaacagttaatgccttctagct

SEQ ID NO: 2364 - DNA, 48 bp, Artificial sequence
  artificial DNA molecule for generation of DNA nanostructure
cagcgaaaacataacgccaaaaggtaaccctccaccatcaaatgccgg

SEQ ID NO: 2365 - DNA, 40 bp, Artificial sequence
  artificial DNA molecule for generation of DNA nanostructure
ccaatactagcggattgcatcaaaaagattaagaggaagc

SEQ ID NO: 2366 - DNA, 50 bp, Artificial sequence
  artificial DNA molecule for generation of DNA nanostructure
gcggaatcgtcataaatgagagatgagaaaggcattaaatttttgtgagc

SEQ ID NO: 2367 - DNA, 39 bp, Artificial sequence
  artificial DNA molecule for generation of DNA nanostructure
ggaacgccatcaaaaatacgccagtacttttaataaatc

SEQ ID NO: 2368 - DNA, 39 bp, Artificial sequence
  artificial DNA molecule for generation of DNA nanostructure
tcagctcattttttagcaaggatagtcaaatgtttacca

SEQ ID NO: 2369 - DNA, 48 bp, Artificial sequence
  artificial DNA molecule for generation of DNA nanostructure
agtaaaatgttttttttgactggatagcgttttgctttttaaagaagt

SEQ ID NO: 2370 - DNA, 40 bp, Artificial sequence
  artificial DNA molecule for generation of DNA nanostructure
ggccatcgcctgataacaagacaaagaatttttgcgagaa

SEQ ID NO: 2371 - DNA, 48 bp, Artificial sequence
  artificial DNA molecule for generation of DNA nanostructure
aaagactttttcatgaggaagaaaataccacaaaaatagcgagaggct

SEQ ID NO: 2372 - DNA, 48 bp, Artificial sequence
  artificial DNA molecule for generation of DNA nanostructure
gaatccccgtctttaccctgactattatagtctgcgattttaaaaacc

SEQ ID NO: 2373 - DNA, 48 bp, Artificial sequence
  artificial DNA molecule for generation of DNA nanostructure
agttcagaaagagcaacactatcaaattacgaaagcctttccctgtaa

SEQ ID NO: 2374 - DNA, 38 bp, Artificial sequence
  artificial DNA molecule for generation of DNA nanostructure
aggctccaaaaggaccatcaagagaaggataccgccac

SEQ ID NO: 2375 - DNA, 39 bp, Artificial sequence
  artificial DNA molecule for generation of DNA nanostructure
ctggcgaagggcctcttcgctatactttcaaaatttctt

SEQ ID NO: 2376 - DNA, 47 bp, Artificial sequence
  artificial DNA molecule for generation of DNA nanostructure
cattccaagaacgcaaccatcctaatttacgaaaagcctgtttagta

SEQ ID NO: 2377 - DNA, 48 bp, Artificial sequence
  artificial DNA molecule for generation of DNA nanostructure
atcctgaggcttgcagggagccggaaacgtcgcttgcttatagttgcg

SEQ ID NO: 2378 - DNA, 45 bp, Artificial sequence
  artificial DNA molecule for generation of DNA nanostructure
ttaatttcatacagggtagcattaacatccaaacagctatatatt

SEQ ID NO: 2379 - DNA, 40 bp, Artificial sequence
  artificial DNA molecule for generation of DNA nanostructure
tgttgggaagggcgttttttcggtgcagggggatgtgctg

SEQ ID NO: 2380 - DNA, 44 bp, Artificial sequence
  artificial DNA molecule for generation of DNA nanostructure
aaggcacctttttacctaaaagaggctttgaggactacggaaca

SEQ ID NO: 2381 - DNA, 44 bp, Artificial sequence
  artificial DNA molecule for generation of DNA nanostructure
aactttaatcctttttatcggaaaaggtggcatcggatttgggg

SEQ ID NO: 2382 - DNA, 41 bp, Artificial sequence
  artificial DNA molecule for generation of DNA nanostructure
atgatacaggagtgtactggtaataggcgacattcaacgag

SEQ ID NO: 2383 - DNA, 40 bp, Artificial sequence
  artificial DNA molecule for generation of DNA nanostructure
ctcaaatgctttaaacgataaattatatgatagtctggcc

SEQ ID NO: 2384 - DNA, 50 bp, Artificial sequence
  artificial DNA molecule for generation of DNA nanostructure
cgccacgggaacaattctttttactaatagtacaaggcaaagaattagca

SEQ ID NO: 2385 - DNA, 50 bp, Artificial sequence
  artificial DNA molecule for generation of DNA nanostructure
taatgtgtaggtaaagattttttcaaaagggtctacaaaggctatcaggt

SEQ ID NO: 2386 - DNA, 39 bp, Artificial sequence
  artificial DNA molecule for generation of DNA nanostructure
ttcaaccggcgggagggcatagtcttttgcgggatcgtc

SEQ ID NO: 2387 - DNA, 32 bp, Artificial sequence
  artificial DNA molecule for generation of DNA nanostructure
gtattaagcggggtcagtgccttgagtaacag

SEQ ID NO: 2388 - DNA, 53 bp, Artificial sequence
  artificial DNA molecule for generation of DNA nanostructure
acaataacagccagcctaattaggcgttttagcgaacagcaaacgcgctaata

SEQ ID NO: 2389 - DNA, 49 bp, Artificial sequence
  artificial DNA molecule for generation of DNA nanostructure
aaatcacatctaggaatctagaaggcttatccgcaacatatgcgccaaa

SEQ ID NO: 2390 - DNA, 40 bp, Artificial sequence
  artificial DNA molecule for generation of DNA nanostructure
tttgccataggctgagactcccagacatgaaaggaaatta

SEQ ID NO: 2391 - DNA, 46 bp, Artificial sequence
  artificial DNA molecule for generation of DNA nanostructure
attggcgctccagtagcaccattaccattagcaaggtttctttcca

SEQ ID NO: 2392 - DNA, 31 bp, Artificial sequence
  artificial DNA molecule for generation of DNA nanostructure
ttttgtcgaaaggccgcttgagccatttggg

SEQ ID NO: 2393 - DNA, 39 bp, Artificial sequence
  artificial DNA molecule for generation of DNA nanostructure
cagaggcattttttttataatcaaggtttaaacatcggg

SEQ ID NO: 2394 - DNA, 50 bp, Artificial sequence
  artificial DNA molecule for generation of DNA nanostructure
gccgccgccagcattgatttttaggaggttgagcgtcatacatggctttt

SEQ ID NO: 2395 - DNA, 38 bp, Artificial sequence
  artificial DNA molecule for generation of DNA nanostructure
ttttgcggagccagtaaaacaggaggccgatatcagag

SEQ ID NO: 2396 - DNA, 46 bp, Artificial sequence
  artificial DNA molecule for generation of DNA nanostructure
caacatgtcgttttcgcctttagcgtcagaagtaacagcaagttac

SEQ ID NO: 2397 - DNA, 31 bp, Artificial sequence
  artificial DNA molecule for generation of DNA nanostructure
caattcgacattatcagcaacagcgggagct

SEQ ID NO: 2398 - DNA, 31 bp, Artificial sequence
  artificial DNA molecule for generation of DNA nanostructure
tgccacgcgtattaacaccgcctttaaagcc

SEQ ID NO: 2399 - DNA, 39 bp, Artificial sequence
  artificial DNA molecule for generation of DNA nanostructure
aatcctcactcagagtagcagccataagagaatataaag

SEQ ID NO: 2400 - DNA, 44 bp, Artificial sequence
  artificial DNA molecule for generation of DNA nanostructure
caagaaaattttttaatatccatgttcagctaatgctttccaga

SEQ ID NO: 2401 - DNA, 45 bp, Artificial sequence
  artificial DNA molecule for generation of DNA nanostructure
agacgatttcagagccaacgatttagtaattctgtccagacgacg

SEQ ID NO: 2402 - DNA, 30 bp, Artificial sequence
  artificial DNA molecule for generation of DNA nanostructure
agtaccaagtatagcccggaataggtgtat

SEQ ID NO: 2403 - DNA, 39 bp, Artificial sequence
  artificial DNA molecule for generation of DNA nanostructure
agcggggttttgctccgccacccggccttgacagggaag

SEQ ID NO: 2404 - DNA, 48 bp, Artificial sequence
  artificial DNA molecule for generation of DNA nanostructure
aagcgcagtctctgaatttaccgtaaacaatgcgcattagacgggaga

SEQ ID NO: 2405 - DNA, 49 bp, Artificial sequence
  artificial DNA molecule for generation of DNA nanostructure
ccgacaatgagcgacatttttaatcaagtttatcggcattttcggtcat

SEQ ID NO: 2406 - DNA, 48 bp, Artificial sequence
  artificial DNA molecule for generation of DNA nanostructure
tggtaataatcaccttgctgacgtatgaaaaagtataacgaccaccac

SEQ ID NO: 2407 - DNA, 40 bp, Artificial sequence
  artificial DNA molecule for generation of DNA nanostructure
agaatagaaaggaatttttaactaaaaaatctccaaaaaa

SEQ ID NO: 2408 - DNA, 47 bp, Artificial sequence
  artificial DNA molecule for generation of DNA nanostructure
gtgttcagcaaatgcggtcggtggtgccatccatttcatttgaatta

SEQ ID NO: 2409 - DNA, 39 bp, Artificial sequence
  artificial DNA molecule for generation of DNA nanostructure
ttaggcaagtgtagcggtcacgcggcggtcatgagagcc

SEQ ID NO: 2410 - DNA, 48 bp, Artificial sequence
  artificial DNA molecule for generation of DNA nanostructure
agcccttttttacagagagaataaaatgaaaaccgccaccaccggaac

SEQ ID NO: 2411 - DNA, 48 bp, Artificial sequence
  artificial DNA molecule for generation of DNA nanostructure
gcaagccgcagaaccacttttcatattttttcaaaatcaccggaacca

SEQ ID NO: 2412 - DNA, 46 bp, Artificial sequence
  artificial DNA molecule for generation of DNA nanostructure
tattttttttttatatcttaccatcaagattagttgctcgcaataa

SEQ ID NO: 2413 - DNA, 40 bp, Artificial sequence
  artificial DNA molecule for generation of DNA nanostructure
aaataagaaccaccctcatttttagccgccacacaaaata

SEQ ID NO: 2414 - DNA, 53 bp, Artificial sequence
  artificial DNA molecule for generation of DNA nanostructure
cagaagtattgggaacgcgcgtcatggtcatagctgtgagcttgacttataaa

SEQ ID NO: 2415 - DNA, 40 bp, Artificial sequence
  artificial DNA molecule for generation of DNA nanostructure
aaaggtaatttgtttaacgtcaaacataaaaatattcaca

SEQ ID NO: 2416 - DNA, 48 bp, Artificial sequence
  artificial DNA molecule for generation of DNA nanostructure
tctaaagccagcagaagataaaacagaggtgatgcgcgtatgctttcc

SEQ ID NO: 2417 - DNA, 48 bp, Artificial sequence
  artificial DNA molecule for generation of DNA nanostructure
ataatacatttgaggaagcagcaatattaattttttagacaggaatac

SEQ ID NO: 2418 - DNA, 47 bp, Artificial sequence
  artificial DNA molecule for generation of DNA nanostructure
agggaagaaagcgaaaggagcgggctgcggctcgttagataaaggga

SEQ ID NO: 2419 - DNA, 40 bp, Artificial sequence
  artificial DNA molecule for generation of DNA nanostructure
cggggaaagccggcgaacgtggcggagctcgattgctttg

SEQ ID NO: 2420 - DNA, 44 bp, Artificial sequence
  artificial DNA molecule for generation of DNA nanostructure
ggcaaaagcgcgtactatggattcgtaagggagaggcggtgccc

SEQ ID NO: 2421 - DNA, 51 bp, Artificial sequence
  artificial DNA molecule for generation of DNA nanostructure
aaaggtattaaaccaacaacagtagggcttttttaattgagaatcgagcca

SEQ ID NO: 2422 - DNA, 38 bp, Artificial sequence
  artificial DNA molecule for generation of DNA nanostructure
ccctaaagggagcccccgatttattcctgtgtgaaatt

SEQ ID NO: 2423 - DNA, 48 bp, Artificial sequence
  artificial DNA molecule for generation of DNA nanostructure
agaacgcgcctgtttatatcctgacccaatccattaactgaacaccct

SEQ ID NO: 2424 - DNA, 30 bp, Artificial sequence
  artificial DNA molecule for generation of DNA nanostructure
cgaaccacgaccagtattagagccaaccct

SEQ ID NO: 2425 - DNA, 48 bp, Artificial sequence
  artificial DNA molecule for generation of DNA nanostructure
aacaaagattgagtaacaactcgttattagactttacaaacgagaggg

SEQ ID NO: 2426 - DNA, 48 bp, Artificial sequence
  artificial DNA molecule for generation of DNA nanostructure
tttagaagattaaatcctttgcccaatagcggaattatcaatcaatat

SEQ ID NO: 2427 - DNA, 53 bp, Artificial sequence
  artificial DNA molecule for generation of DNA nanostructure
atagccgaacaaaatagctatcttaccgaagaatggaaacaaatattgatata

SEQ ID NO: 2428 - DNA, 39 bp, Artificial sequence
  artificial DNA molecule for generation of DNA nanostructure
ggcggataagtgccgtaattttttcgcctccctgtagcg

SEQ ID NO: 2429 - DNA, 36 bp, Artificial sequence
  artificial DNA molecule for generation of DNA nanostructure
ggttttgaagccttaaaacgctaatttttgagcgtc

SEQ ID NO: 2430 - DNA, 39 bp, Artificial sequence
  artificial DNA molecule for generation of DNA nanostructure
cacgttgaggaattgcgaataatcagatgatgaatatac

SEQ ID NO: 2431 - DNA, 38 bp, Artificial sequence
  artificial DNA molecule for generation of DNA nanostructure
gcacgtaaaacagagaaacctcaaatatcagtcaatag

SEQ ID NO: 2432 - DNA, 41 bp, Artificial sequence
  artificial DNA molecule for generation of DNA nanostructure
aaacatcgccattaaaaataccgaagcgccgctacaggtcc

SEQ ID NO: 2433 - DNA, 48 bp, Artificial sequence
  artificial DNA molecule for generation of DNA nanostructure
ttaaaagtaaccaccagaaggaaagaaattgcggtcggtacgccagaa

SEQ ID NO: 2434 - DNA, 40 bp, Artificial sequence
  artificial DNA molecule for generation of DNA nanostructure
gttaagcctaacggaatacccaaaagaactggcatgatta

SEQ ID NO: 2435 - DNA, 48 bp, Artificial sequence
  artificial DNA molecule for generation of DNA nanostructure
tcagagagataatttttccacaagaattgagaacatttttagtcagag

SEQ ID NO: 2436 - DNA, 50 bp, Artificial sequence
  artificial DNA molecule for generation of DNA nanostructure
caataataagagcaagtccagtaaggcaggtccaccgtattttttcagga

SEQ ID NO: 2437 - DNA, 66 bp, Artificial sequence
  artificial DNA molecule for generation of DNA nanostructure
gcagtagagtaggtagagattaggcaagagactacctttttaaatacactcgcgagctattgtgtc

SEQ ID NO: 2438 - DNA, 48 bp, Artificial sequence
  artificial DNA molecule for generation of DNA nanostructure
aattaagcaatagggttttcccagtatattttcataacctcaggtctg

SEQ ID NO: 2439 - DNA, 71 bp, Artificial sequence
  artificial DNA molecule for generation of DNA nanostructure
gcagtagagtaggtagagattaggcacaatactattaattctggtcatgtacatcgacataaataattgcg

SEQ ID NO: 2440 - DNA, 34 bp, Artificial sequence
  artificial DNA molecule for generation of DNA nanostructure
tcagcgtagacgctgaaaacatagcgatagcaat

SEQ ID NO: 2441 - DNA, 63 bp, Artificial sequence
  artificial DNA molecule for generation of DNA nanostructure
gcagtagagtaggtagagattaggcatcagatgtaaaacattcaggcaaaccaggcaaagcgc

SEQ ID NO: 2442 - DNA, 42 bp, Artificial sequence
  artificial DNA molecule for generation of DNA nanostructure
cgttccgggacccccaaaaatcataccggaaacaatcggctt

SEQ ID NO: 2443 - DNA, 66 bp, Artificial sequence
  artificial DNA molecule for generation of DNA nanostructure
gcagtagagtaggtagagattaggcaatcataattactagaagcatgtagatagcagcgtaccgca

SEQ ID NO: 2444 - DNA, 48 bp, Artificial sequence
  artificial DNA molecule for generation of DNA nanostructure
gcccccttattatatcggtttatcaaccaatgacaaccatccaccgga

SEQ ID NO: 2445 - DNA, 63 bp, Artificial sequence
  artificial DNA molecule for generation of DNA nanostructure
gcagtagagtaggtagagattaggcaatgcattcaaatatattttagaccctcagcattatga

SEQ ID NO: 2446 - DNA, 43 bp, Artificial sequence
  artificial DNA molecule for generation of DNA nanostructure
tgtaaatggtttgaaataccgacctgacctaaatttaatgctg

SEQ ID NO: 2447 - DNA, 68 bp, Artificial sequence
  artificial DNA molecule for generation of DNA nanostructure
gcagtagagtaggtagagattaggcataccgtcgaggtgcagtttcagggattttccgtaacactgag

SEQ ID NO: 2448 - DNA, 59 bp, Artificial sequence
  artificial DNA molecule for generation of DNA nanostructure
cggtcgttcgtgtgataaataaggcgttaaataagaataaagcccacgcataaccgtga

SEQ ID NO: 2449 - DNA, 66 bp, Artificial sequence
  artificial DNA molecule for generation of DNA nanostructure
gcagtagagtaggtagagattaggcattaattacatttaacacacgcaacaaagagtcagatgccg

SEQ ID NO: 2450 - DNA, 48 bp, Artificial sequence
  artificial DNA molecule for generation of DNA nanostructure
aactatcggccttgcgtagattttcgtgaggccattcgcctaacaaaa

SEQ ID NO: 2451 - DNA, 71 bp, Artificial sequence
  artificial DNA molecule for generation of DNA nanostructure
gcagtagagtaggtagagattaggcatataaccatatttaacaacgctaccgacagagccaccctcagaac

SEQ ID NO: 2452 - DNA, 27 bp, Artificial sequence
  artificial DNA molecule for generation of DNA nanostructure
ttacctgagcagaggcgaattattcag

SEQ ID NO: 2453 - DNA, 63 bp, Artificial sequence
  artificial DNA molecule for generation of DNA nanostructure
gcagtagagtaggtagagattaggcacttttcgtcagatggcaattctcatattcctgattat

SEQ ID NO: 2454 - DNA, 47 bp, Artificial sequence
  artificial DNA molecule for generation of DNA nanostructure
ctcaatccgccgggccctgcgatcaagaagattgctttgaatactac

SEQ ID NO: 2455 - DNA, 47 bp, Artificial sequence
  artificial DNA molecule for generation of DNA nanostructure
aggtctgagagactacctttttaaatacactcgcgagctattgtgtc

SEQ ID NO: 2456 - DNA, 41 bp, Artificial sequence
  artificial DNA molecule for generation of DNA nanostructure
aattaagcaatagggttttcccagtatattttcataacctc

SEQ ID NO: 2457 - DNA, 40 bp, Artificial sequence
  artificial DNA molecule for generation of DNA nanostructure
ctattaattctggtcatgtacatcgacataaataattgcg

SEQ ID NO: 2458 - DNA, 39 bp, Artificial sequence
  artificial DNA molecule for generation of DNA nanostructure
tcagcgtagacgctgaaaacatagcgatagcaatcaata

SEQ ID NO: 2459 - DNA, 40 bp, Artificial sequence
  artificial DNA molecule for generation of DNA nanostructure
ctttcagatgtaaaacattcaggcaaaccaggcaaagcgc

SEQ ID NO: 2460 - DNA, 39 bp, Artificial sequence
  artificial DNA molecule for generation of DNA nanostructure
cgttccgggacccccaaaaatcataccggaaacaatcgg

SEQ ID NO: 2461 - DNA, 47 bp, Artificial sequence
  artificial DNA molecule for generation of DNA nanostructure
caccggaatcataattactagaagcatgtagatagcagcgtaccgca

SEQ ID NO: 2462 - DNA, 41 bp, Artificial sequence
  artificial DNA molecule for generation of DNA nanostructure
gcccccttattatatcggtttatcaaccaatgacaaccatc

SEQ ID NO: 2463 - DNA, 32 bp, Artificial sequence
  artificial DNA molecule for generation of DNA nanostructure
ttcaaatatattttagaccctcagcattatga

SEQ ID NO: 2464 - DNA, 48 bp, Artificial sequence
  artificial DNA molecule for generation of DNA nanostructure
tgtaaatggtttgaaataccgacctgacctaaatttaatgctgatgca

SEQ ID NO: 2465 - DNA, 53 bp, Artificial sequence
  artificial DNA molecule for generation of DNA nanostructure
cataaccgtgataccgtcgaggtgcagtttcagggattttccgtaacactgag

SEQ ID NO: 2466 - DNA, 48 bp, Artificial sequence
  artificial DNA molecule for generation of DNA nanostructure
cggtcgttcgtgtgataaataaggcgttaaataagaataaagcccacg

SEQ ID NO: 2467 - DNA, 47 bp, Artificial sequence
  artificial DNA molecule for generation of DNA nanostructure
aacaaaattaattacatttaacacacgcaacaaagagtcagatgccg

SEQ ID NO: 2468 - DNA, 41 bp, Artificial sequence
  artificial DNA molecule for generation of DNA nanostructure
aactatcggccttgcgtagattttcgtgaggccattcgcct

SEQ ID NO: 2469 - DNA, 32 bp, Artificial sequence
  artificial DNA molecule for generation of DNA nanostructure
aacaacgctaccgacagagccaccctcagaac

SEQ ID NO: 2470 - DNA, 40 bp, Artificial sequence
  artificial DNA molecule for generation of DNA nanostructure
ttacctgagcagaggcgaattattcagtataaccatattt

SEQ ID NO: 2471 - DNA, 40 bp, Artificial sequence
  artificial DNA molecule for generation of DNA nanostructure
taccttttcgtcagatggcaattctcatattcctgattat

SEQ ID NO: 2472 - DNA, 51 bp, Artificial sequence
  artificial DNA molecule for generation of DNA nanostructure
ggacttgtgttaaacgatgctgattgcgagcacataggcggccggaaccga

SEQ ID NO: 2473 - DNA, 22 bp, Artificial sequence
  artificial DNA molecule for generation of DNA nanostructure
cgtctcgtcgcaaagctgctca

SEQ ID NO: 2474 - DNA, 52 bp, Artificial sequence
  artificial DNA molecule for generation of DNA nanostructure
aaccggatattcattagagtaatctgaacggtacctttaattgctaaaaccg

SEQ ID NO: 2475 - DNA, 43 bp, Artificial sequence
  artificial DNA molecule for generation of DNA nanostructure
ttcagtgagctggctgaccttcatcaacccaaatcatcataag

SEQ ID NO: 2476 - DNA, 40 bp, Artificial sequence
  artificial DNA molecule for generation of DNA nanostructure
tcaaagggctgagagagaggaaagaggacagattgacaag

SEQ ID NO: 2477 - DNA, 51 bp, Artificial sequence
  artificial DNA molecule for generation of DNA nanostructure
tccgccatgtttaccatgaagggtagccgcaccctcataacggaacgtgcc

SEQ ID NO: 2478 - DNA, 39 bp, Artificial sequence
  artificial DNA molecule for generation of DNA nanostructure
tttcgcaccaagccatctttcaaacgcggtccgtttttt

SEQ ID NO: 2479 - DNA, 39 bp, Artificial sequence
  artificial DNA molecule for generation of DNA nanostructure
gtttaccaaaaagaaacgcaaagacaccacggcaagcaa

SEQ ID NO: 2480 - DNA, 37 bp, Artificial sequence
  artificial DNA molecule for generation of DNA nanostructure
aaaatacgtaatgccactacggggttatataactata

SEQ ID NO: 2481 - DNA, 42 bp, Artificial sequence
  artificial DNA molecule for generation of DNA nanostructure
attataccagtcaggacgttgggaagtttcggaacgagggta

SEQ ID NO: 2482 - DNA, 40 bp, Artificial sequence
  artificial DNA molecule for generation of DNA nanostructure
ttcatatgttcattaaatcagataattaccgcgcccaata

SEQ ID NO: 2483 - DNA, 40 bp, Artificial sequence
  artificial DNA molecule for generation of DNA nanostructure
cgctaccgtaatcagtacaaaaccatcgaaaccaatcaat

SEQ ID NO: 2484 - DNA, 45 bp, Artificial sequence
  artificial DNA molecule for generation of DNA nanostructure
ccggagacaaaaatttatgcagatgacagcatccattaaacgggt

SEQ ID NO: 2485 - DNA, 43 bp, Artificial sequence
  artificial DNA molecule for generation of DNA nanostructure
aatcggctgtctttccttatttcatcggagaacaaatattgac

SEQ ID NO: 2486 - DNA, 45 bp, Artificial sequence
  artificial DNA molecule for generation of DNA nanostructure
agagggtagctatttttattcattgacgacgataagaactggctc

SEQ ID NO: 2487 - DNA, 43 bp, Artificial sequence
  artificial DNA molecule for generation of DNA nanostructure
taagtcctgaacatatgcgttatacaaattcttaccatttcaa

SEQ ID NO: 2488 - DNA, 38 bp, Artificial sequence
  artificial DNA molecule for generation of DNA nanostructure
cactctgtggtgcgctagggcgctagaaaagtaagcag

SEQ ID NO: 2489 - DNA, 51 bp, Artificial sequence
  artificial DNA molecule for generation of DNA nanostructure
aatttaggaaaatcgcgcaaaagaagatgatgaaacaaacgctggtaatgg

SEQ ID NO: 2490 - DNA, 22 bp, Artificial sequence
  artificial DNA molecule for generation of DNA nanostructure
agctacaattttcaacaataga

SEQ ID NO: 2491 - DNA, 43 bp, Artificial sequence
  artificial DNA molecule for generation of DNA nanostructure
aaatagcagttaccagaaggaaaccgaggaaaattttgcaccc

SEQ ID NO: 2492 - DNA, 22 bp, Artificial sequence
  artificial DNA molecule for generation of DNA nanostructure
gtaaaggtttcgcgcgcctgtg

SEQ ID NO: 2493 - DNA, 44 bp, Artificial sequence
  artificial DNA molecule for generation of DNA nanostructure
gccgttttcacgggtgtcacttttgctcgtcctgagaagtgtcg

SEQ ID NO: 2494 - DNA, 45 bp, Artificial sequence
  artificial DNA molecule for generation of DNA nanostructure
gaggtgtccagcaacactggtcctgcatcctgcagccacgagcac

SEQ ID NO: 2495 - DNA, 45 bp, Artificial sequence
  artificial DNA molecule for generation of DNA nanostructure
gcctgttcttcgccgggtaccagaaaggaacccgccgcgcttaat

SEQ ID NO: 2496 - DNA, 44 bp, Artificial sequence
  artificial DNA molecule for generation of DNA nanostructure
ctcaatccgccgggccctgcgatcaagaagattgctttgaatac

SEQ ID NO: 2497 - DNA, 45 bp, Artificial sequence
  artificial DNA molecule for generation of DNA nanostructure
agccgggtcatccctttcagcgggggggtttctgccagcacgcgt

SEQ ID NO: 2498 - DNA, 43 bp, Artificial sequence
  artificial DNA molecule for generation of DNA nanostructure
agacgatggatcccgtccgtgagcctcctccagaatgcggcgg

SEQ ID NO: 2499 - DNA, 43 bp, Artificial sequence
  artificial DNA molecule for generation of DNA nanostructure
tcataaacactgttgcgcggttgcggtatgcagcttacggctg

SEQ ID NO: 2500 - DNA, 45 bp, Artificial sequence
  artificial DNA molecule for generation of DNA nanostructure
acagttgaccagcgcatcataccggtcattgcaggcgctttcgca

SEQ ID NO: 2501 - DNA, 56 bp, Artificial sequence
  artificial DNA molecule for generation of DNA nanostructure
tttttggacttgtgttaaacgatgctgattgcgagcacataggcggccggaaccga

SEQ ID NO: 2502 - DNA, 32 bp, Artificial sequence
  artificial DNA molecule for generation of DNA nanostructure
tttttcgtctcgtcgcaaagctgctcattttt

SEQ ID NO: 2503 - DNA, 57 bp, Artificial sequence
  artificial DNA molecule for generation of DNA nanostructure
tttttaaccggatattcattagagtaatctgaacggtacctttaattgctaaaaccg

SEQ ID NO: 2504 - DNA, 48 bp, Artificial sequence
  artificial DNA molecule for generation of DNA nanostructure
tttttttcagtgagctggctgaccttcatcaacccaaatcatcataag

SEQ ID NO: 2505 - DNA, 45 bp, Artificial sequence
  artificial DNA molecule for generation of DNA nanostructure
tcaaagggctgagagagaggaaagaggacagattgacaagttttt

SEQ ID NO: 2506 - DNA, 56 bp, Artificial sequence
  artificial DNA molecule for generation of DNA nanostructure
tccgccatgtttaccatgaagggtagccgcaccctcataacggaacgtgccttttt

SEQ ID NO: 2507 - DNA, 44 bp, Artificial sequence
  artificial DNA molecule for generation of DNA nanostructure
tttcgcaccaagccatctttcaaacgcggtccgttttttttttt

SEQ ID NO: 2508 - DNA, 39 bp, Artificial sequence; identical to SEQ ID NO: 2479
  artificial DNA molecule for generation of DNA nanostructure

SEQ ID NO: 2509 - DNA, 42 bp, Artificial sequence
  artificial DNA molecule for generation of DNA nanostructure
tttttaaaatacgtaatgccactacggggttatataactata

SEQ ID NO: 2510 - DNA, 47 bp, Artificial sequence
  artificial DNA molecule for generation of DNA nanostructure
tttttattataccagtcaggacgttgggaagtttcggaacgagggta

SEQ ID NO: 2511 - DNA, 45 bp, Artificial sequence
  artificial DNA molecule for generation of DNA nanostructure
ttcatatgttcattaaatcagataattaccgcgcccaatattttt

SEQ ID NO: 2512 - DNA, 45 bp, Artificial sequence
  artificial DNA molecule for generation of DNA nanostructure
cgctaccgtaatcagtacaaaaccatcgaaaccaatcaatttttt

SEQ ID NO: 2513 - DNA, 50 bp, Artificial sequence
  artificial DNA molecule for generation of DNA nanostructure
ccggagacaaaaatttatgcagatgacagcatccattaaacgggtttttt

SEQ ID NO: 2514 - DNA, 48 bp, Artificial sequence
  artificial DNA molecule for generation of DNA nanostructure
tttttaatcggctgtctttccttatttcatcggagaacaaatattgac

SEQ ID NO: 2515 - DNA, 50 bp, Artificial sequence
  artificial DNA molecule for generation of DNA nanostructure
agagggtagctatttttattcattgacgacgataagaactggctcttttt

SEQ ID NO: 2516 - DNA, 48 bp, Artificial sequence
  artificial DNA molecule for generation of DNA nanostructure
ttttttaagtcctgaacatatgcgttatacaaattcttaccatttcaa

SEQ ID NO: 2517 - DNA, 43 bp, Artificial sequence
  artificial DNA molecule for generation of DNA nanostructure
tttttcactctgtggtgcgctagggcgctagaaaagtaagcag

SEQ ID NO: 2518 - DNA, 56 bp, Artificial sequence
  artificial DNA molecule for generation of DNA nanostructure
aatttaggaaaatcgcgcaaaagaagatgatgaaacaaacgctggtaatggttttt

SEQ ID NO: 2519 - DNA, 32 bp, Artificial sequence
  artificial DNA molecule for generation of DNA nanostructure
tttttagctacaattttcaacaatagattttt

SEQ ID NO: 2520 - DNA, 48 bp, Artificial sequence
  artificial DNA molecule for generation of DNA nanostructure
aaatagcagttaccagaaggaaaccgaggaaaattttgcacccttttt

SEQ ID NO: 2521 - DNA, 32 bp, Artificial sequence
  artificial DNA molecule for generation of DNA nanostructure
tttttgtaaaggtttcgcgcgcctgtgttttt

SEQ ID NO: 2522 - DNA, 49 bp, Artificial sequence
  artificial DNA molecule for generation of DNA nanostructure
tttttgccgttttcacgggtgtcacttttgctcgtcctgagaagtgtcg

SEQ ID NO: 2523 - DNA, 50 bp, Artificial sequence
  artificial DNA molecule for generation of DNA nanostructure
tttttgaggtgtccagcaacactggtcctgcatcctgcagccacgagcac

SEQ ID NO: 2524 - DNA, 50 bp, Artificial sequence
  artificial DNA molecule for generation of DNA nanostructure
tttttgcctgttcttcgccgggtaccagaaaggaacccgccgcgcttaat

SEQ ID NO: 2525 - DNA, 49 bp, Artificial sequence
  artificial DNA molecule for generation of DNA nanostructure
tttttctcaatccgccgggccctgcgatcaagaagattgctttgaatac

SEQ ID NO: 2526 - DNA, 50 bp, Artificial sequence
  artificial DNA molecule for generation of DNA nanostructure
agccgggtcatccctttcagcgggggggtttctgccagcacgcgtttttt

SEQ ID NO: 2527 - DNA, 48 bp, Artificial sequence
  artificial DNA molecule for generation of DNA nanostructure
agacgatggatcccgtccgtgagcctcctccagaatgcggcggttttt

SEQ ID NO: 2528 - DNA, 48 bp, Artificial sequence
  artificial DNA molecule for generation of DNA nanostructure
tcataaacactgttgcgcggttgcggtatgcagcttacggctgttttt

SEQ ID NO: 2529 - DNA, 50 bp, Artificial sequence
  artificial DNA molecule for generation of DNA nanostructure
acagttgaccagcgcatcataccggtcattgcaggcgctttcgcattttt

SEQ ID NO: 2530 - DNA, 44 bp, Artificial sequence
  artificial DNA molecule for generation of DNA nanostructure
aggggacgacgacagtttttatcggcctcaggaaaccgtgcatc

SEQ ID NO: 2531 - DNA, 48 bp, Artificial sequence
  artificial DNA molecule for generation of DNA nanostructure
ccgaacaagaatacccaaaagaaccatacataacagccatgttttgaa

SEQ ID NO: 2532 - DNA, 40 bp, Artificial sequence
  artificial DNA molecule for generation of DNA nanostructure
ttagacgggagaacccgaagcccttccttatttgcagcca

SEQ ID NO: 2533 - DNA, 45 bp, Artificial sequence
  artificial DNA molecule for generation of DNA nanostructure
gaatcgattctactaagctatattttcatttaagattgatcagaa

SEQ ID NO: 2534 - DNA, 42 bp, Artificial sequence
  artificial DNA molecule for generation of DNA nanostructure
ccaataataagagcaagagcagatagaaacagggaacgtcaa

SEQ ID NO: 2535 - DNA, 48 bp, Artificial sequence
  artificial DNA molecule for generation of DNA nanostructure
gtgtacagaccaggcgcataggctatgccactgaggcgcaaaacagct

SEQ ID NO: 2536 - DNA, 47 bp, Artificial sequence
  artificial DNA molecule for generation of DNA nanostructure
actattatctggagcacaaactaatagcgcgaaacaaagtgctccat

SEQ ID NO: 2537 - DNA, 52 bp, Artificial sequence
  artificial DNA molecule for generation of DNA nanostructure
agaaaaatctttcatcaagagtaatcttgacatttttgaaccggatattcat

SEQ ID NO: 2538 - DNA, 46 bp, Artificial sequence
  artificial DNA molecule for generation of DNA nanostructure
aagcaaacttaattgcgtctggaaatattttaattttttgcaatgc

SEQ ID NO: 2539 - DNA, 38 bp, Artificial sequence
  artificial DNA molecule for generation of DNA nanostructure
cttagagctccaacaggtcaggatttttttgagagtac

SEQ ID NO: 2540 - DNA, 39 bp, Artificial sequence
  artificial DNA molecule for generation of DNA nanostructure
ctagcatgcagcaagcccaatagcgaacgatctaaagtt

SEQ ID NO: 2541 - DNA, 38 bp, Artificial sequence
  artificial DNA molecule for generation of DNA nanostructure
agatttgtaacactcatagttagcgtaattatgaaaca

SEQ ID NO: 2542 - DNA, 41 bp, Artificial sequence
  artificial DNA molecule for generation of DNA nanostructure
tcacgacgttgagcgctaatatccgcaagtcagattgaata

SEQ ID NO: 2543 - DNA, 48 bp, Artificial sequence
  artificial DNA molecule for generation of DNA nanostructure
agagccaccaccctcaaccctcagatagctatagctagcaaggaccat

SEQ ID NO: 2544 - DNA, 45 bp, Artificial sequence
  artificial DNA molecule for generation of DNA nanostructure
tatgttagccggagacagtcaaatcaccatcacgcgagtcgaaat

SEQ ID NO: 2545 - DNA, 44 bp, Artificial sequence
  artificial DNA molecule for generation of DNA nanostructure
tgataccgcaacctttaattgtatcggtttttttatcagctcac

SEQ ID NO: 2546 - DNA, 48 bp, Artificial sequence
  artificial DNA molecule for generation of DNA nanostructure
ttctaagaagaggacaagaggcaaccgcgacctacaacggggctatca

SEQ ID NO: 2547 - DNA, 38 bp, Artificial sequence
  artificial DNA molecule for generation of DNA nanostructure
tgataagaggtcttttttttttgcggatggtcattata

SEQ ID NO: 2548 - DNA, 48 bp, Artificial sequence
  artificial DNA molecule for generation of DNA nanostructure
cctaatttcaacgctcgggttatataactatactgtaaatagagagaa

SEQ ID NO: 2549 - DNA, 38 bp, Artificial sequence
  artificial DNA molecule for generation of DNA nanostructure
catcaatgaacggtaatcgaccatgtaccgtatcatcg

SEQ ID NO: 2550 - DNA, 47 bp, Artificial sequence
  artificial DNA molecule for generation of DNA nanostructure
gcaccattaccattgaaaaggtggattaagcaacggagatctacaaa

SEQ ID NO: 2551 - DNA, 42 bp, Artificial sequence
  artificial DNA molecule for generation of DNA nanostructure
accagtaaaagtaaaacaatgctgaacacaccctcggcgatc

SEQ ID NO: 2552 - DNA, 43 bp, Artificial sequence
  artificial DNA molecule for generation of DNA nanostructure
aatgggagggattttgcttttttaacaactttcaaattttttc

SEQ ID NO: 2553 - DNA, 39 bp, Artificial sequence
  artificial DNA molecule for generation of DNA nanostructure
atcataccctgagagtgataaatgttacttaggaaccga

SEQ ID NO: 2554 - DNA, 46 bp, Artificial sequence
  artificial DNA molecule for generation of DNA nanostructure
aatttcttaaaacgaactaatttttggaacaacattatccagtcag

SEQ ID NO: 2555 - DNA, 44 bp, Artificial sequence
  artificial DNA molecule for generation of DNA nanostructure
aggcaagggataaaaatttttagaaccttttttcatgtttcatt

SEQ ID NO: 2556 - DNA, 39 bp, Artificial sequence
  artificial DNA molecule for generation of DNA nanostructure
caataacggattcgccctattacgccagctggcgaaagg

SEQ ID NO: 2557 - DNA, 40 bp, Artificial sequence
  artificial DNA molecule for generation of DNA nanostructure
cgcagagggaattaactgaacaccaaatagcaaaccgcca

SEQ ID NO: 2558 - DNA, 40 bp, Artificial sequence
  artificial DNA molecule for generation of DNA nanostructure
tttccagatccagccatcaccagtaaacaagaggtcattg

SEQ ID NO: 2559 - DNA, 40 bp, Artificial sequence
  artificial DNA molecule for generation of DNA nanostructure
ttctgtattaggtcacgttggtgtagatgggcccaggcaa

SEQ ID NO: 2560 - DNA, 44 bp, Artificial sequence
  artificial DNA molecule for generation of DNA nanostructure
acgttgaatttttatctccaaaaaaaagcaaccatcgcccacgc

SEQ ID NO: 2561 - DNA, 38 bp, Artificial sequence
  artificial DNA molecule for generation of DNA nanostructure
agctatttttgacagaaattgtggcgttttatccggta

SEQ ID NO: 2562 - DNA, 46 bp, Artificial sequence
  artificial DNA molecule for generation of DNA nanostructure
taatgccgattcaacctgtgtaggtaaagattcaaaaggttatttc

SEQ ID NO: 2563 - DNA, 43 bp, Artificial sequence
  artificial DNA molecule for generation of DNA nanostructure
ctttaatttagtcagaagctttttaagcggattgcataccctg

SEQ ID NO: 2564 - DNA, 32 bp, Artificial sequence
  artificial DNA molecule for generation of DNA nanostructure
gccggaaacgtaccccggttgatatataagca

SEQ ID NO: 2565 - DNA, 30 bp, Artificial sequence
  artificial DNA molecule for generation of DNA nanostructure
tttgggaattagagccagcaagccgccacc

SEQ ID NO: 2566 - DNA, 48 bp, Artificial sequence
  artificial DNA molecule for generation of DNA nanostructure
gtgaataaccttgctttgtaaatgaaatgaaacaaaataaaaggtggc

SEQ ID NO: 2567 - DNA, 34 bp, Artificial sequence
  artificial DNA molecule for generation of DNA nanostructure
gggagggaaggtattatcacgaaaatatggcatg

SEQ ID NO: 2568 - DNA, 32 bp, Artificial sequence
  artificial DNA molecule for generation of DNA nanostructure
gccagttaatagcagccttagacgctgagaag

SEQ ID NO: 2569 - DNA, 34 bp, Artificial sequence
  artificial DNA molecule for generation of DNA nanostructure
gctttccggtcaatcatatgtccaatactgcgga

SEQ ID NO: 2570 - DNA, 35 bp, Artificial sequence
  artificial DNA molecule for generation of DNA nanostructure
cgtcaccgacttggggtcggttgtaccaaaaacat

SEQ ID NO: 2571 - DNA, 40 bp, Artificial sequence
  artificial DNA molecule for generation of DNA nanostructure
gatcgcaccgttagtactgtagcattccacaggcgattat

SEQ ID NO: 2572 - DNA, 42 bp, Artificial sequence
  artificial DNA molecule for generation of DNA nanostructure
cttaggttaacagtagggcttaatagccgtttccagctacaa

SEQ ID NO: 2573 - DNA, 48 bp, Artificial sequence
  artificial DNA molecule for generation of DNA nanostructure
ctgatgcattaaaattcttaccagccgcgcccgccttaaatcaagatt

SEQ ID NO: 2574 - DNA, 40 bp, Artificial sequence
  artificial DNA molecule for generation of DNA nanostructure
caaagaacccttaagaaacgatttattaagacttttaaga

SEQ ID NO: 2575 - DNA, 38 bp, Artificial sequence
  artificial DNA molecule for generation of DNA nanostructure
aaggtgaaaatattgaaaagacaaaagggcggcgggag

SEQ ID NO: 2576 - DNA, 48 bp, Artificial sequence
  artificial DNA molecule for generation of DNA nanostructure
accaagttaccaacctaaaacgaagatgaacgactgaccaactttgaa

SEQ ID NO: 2577 - DNA, 46 bp, Artificial sequence
  artificial DNA molecule for generation of DNA nanostructure
catgaggaagtttttttccattaaataatttttcgatatattcggt

SEQ ID NO: 2578 - DNA, 40 bp, Artificial sequence
  artificial DNA molecule for generation of DNA nanostructure
gaggtttagtaccgccaaaacaggggggcgcgctttaaaa

SEQ ID NO: 2579 - DNA, 39 bp, Artificial sequence
  artificial DNA molecule for generation of DNA nanostructure
aatatgatgagagggtaacgcaagcaaagaattagcaaa

SEQ ID NO: 2580 - DNA, 47 bp, Artificial sequence
  artificial DNA molecule for generation of DNA nanostructure
aatagcaagcaaatcagatatagtcaaatatatcccaatccaaagat

SEQ ID NO: 2581 - DNA, 40 bp, Artificial sequence
  artificial DNA molecule for generation of DNA nanostructure
ctgagtaagttctagcgctcctttatcataaggccggaac

SEQ ID NO: 2582 - DNA, 32 bp, Artificial sequence
  artificial DNA molecule for generation of DNA nanostructure
ccggaatcataattacatttaatgaaactttt

SEQ ID NO: 2583 - DNA, 39 bp, Artificial sequence
  artificial DNA molecule for generation of DNA nanostructure
gcataaagctaaaagaagcctgtgagaaaggccgattga

SEQ ID NO: 2584 - DNA, 48 bp, Artificial sequence
  artificial DNA molecule for generation of DNA nanostructure
acgaaggcgcgccgacaatgacaagctccaaaaggagcgcaatgaatt

SEQ ID NO: 2585 - DNA, 40 bp, Artificial sequence
  artificial DNA molecule for generation of DNA nanostructure
acgggtaaaatacgtaggctgaccacgttaatgacggtca

SEQ ID NO: 2586 - DNA, 32 bp, Artificial sequence
  artificial DNA molecule for generation of DNA nanostructure
ttattttcatcgtaggaatcattatataaagc

SEQ ID NO: 2587 - DNA, 32 bp, Artificial sequence
  artificial DNA molecule for generation of DNA nanostructure
tatgaccctgtaatactttataaagcctcaga

SEQ ID NO: 2588 - DNA, 40 bp, Artificial sequence
  artificial DNA molecule for generation of DNA nanostructure
aaggcttagcgaacctcccgacttacattcaacaaacgta

SEQ ID NO: 2589 - DNA, 48 bp, Artificial sequence
  artificial DNA molecule for generation of DNA nanostructure
ggaggtcaataacctttttttttatagtagtagtttttattaatagat

SEQ ID NO: 2590 - DNA, 40 bp, Artificial sequence
  artificial DNA molecule for generation of DNA nanostructure
atttcatttgaattaccttttttaagaagatgattcattt

SEQ ID NO: 2591 - DNA, 44 bp, Artificial sequence
  artificial DNA molecule for generation of DNA nanostructure
ccgccacccctcattaaagccagaatgtttttaaagattcatta

SEQ ID NO: 2592 - DNA, 48 bp, Artificial sequence
  artificial DNA molecule for generation of DNA nanostructure
atcggctgtctttccttatcattcttaggcagtaagtcctgtgaattt

SEQ ID NO: 2593 - DNA, 38 bp, Artificial sequence
  artificial DNA molecule for generation of DNA nanostructure
atggtttaaacatataaaagaaacgtttttaaagacac

SEQ ID NO: 2594 - DNA, 46 bp, Artificial sequence
  artificial DNA molecule for generation of DNA nanostructure
ccagcgcccggaaattcgcagtctctttttgaatttaccgttccag

SEQ ID NO: 2595 - DNA, 39 bp, Artificial sequence
  artificial DNA molecule for generation of DNA nanostructure
aggcggttagaaaccaatcaatactaatttacgagcatg

SEQ ID NO: 2596 - DNA, 39 bp, Artificial sequence
  artificial DNA molecule for generation of DNA nanostructure
ctcagaattaagagggcccgtatgtttatcaatcccatc

SEQ ID NO: 2597 - DNA, 44 bp, Artificial sequence
  artificial DNA molecule for generation of DNA nanostructure
ttttcccttttttagaatccttgaaaaccataggtctgagagac

SEQ ID NO: 2598 - DNA, 47 bp, Artificial sequence
  artificial DNA molecule for generation of DNA nanostructure
gtgccagctgcattaatgaatcggccaacgccagggtggtttttctt

SEQ ID NO: 2599 - DNA, 52 bp, Artificial sequence
  artificial DNA molecule for generation of DNA nanostructure
ttttatcctgggtattaaaccaagtaccgcactttttcatcgagaacaagca

SEQ ID NO: 2600 - DNA, 39 bp, Artificial sequence
  artificial DNA molecule for generation of DNA nanostructure
ggggtcagaatgccccaaataaatctcagagccaccacc

SEQ ID NO: 2601 - DNA, 44 bp, Artificial sequence
  artificial DNA molecule for generation of DNA nanostructure
gactgtagcgcgtaccggaacctcagagcggggaacctattatt

SEQ ID NO: 2602 - DNA, 51 bp, Artificial sequence
  artificial DNA molecule for generation of DNA nanostructure
tgaggccagttgctttgtaataacatcacgccccgccagcattgacaggag

SEQ ID NO: 2603 - DNA, 25 bp, Artificial sequence
  artificial DNA molecule for generation of DNA nanostructure
gttagaactcaaactacctgaaagc

SEQ ID NO: 2604 - DNA, 32 bp, Artificial sequence
  artificial DNA molecule for generation of DNA nanostructure
tcactgcccgctttccagtcgggagttaacgg

SEQ ID NO: 2605 - DNA, 48 bp, Artificial sequence
  artificial DNA molecule for generation of DNA nanostructure
ctgtttgacatcagatgtcataaacatcccttagcaccgtttaaagaa

SEQ ID NO: 2606 - DNA, 40 bp, Artificial sequence
  artificial DNA molecule for generation of DNA nanostructure
accaccagagccgttgatatttgatacaggagtgagtaaa

SEQ ID NO: 2607 - DNA, 47 bp, Artificial sequence
  artificial DNA molecule for generation of DNA nanostructure
taactgattgtttggatttcagggcgatggcagcttgacagcggaat

SEQ ID NO: 2608 - DNA, 32 bp, Artificial sequence
  artificial DNA molecule for generation of DNA nanostructure
tggtggttacaagagtccacaatccgccgggc

SEQ ID NO: 2609 - DNA, 49 bp, Artificial sequence
  artificial DNA molecule for generation of DNA nanostructure
aaaagaattaagtactatgccgtactggtaataagttttaacttgcgta

SEQ ID NO: 2610 - DNA, 42 bp, Artificial sequence
  artificial DNA molecule for generation of DNA nanostructure
tcacgcaatgtttttataatcagttcaccacccttataaatc

SEQ ID NO: 2611 - DNA, 33 bp, Artificial sequence
  artificial DNA molecule for generation of DNA nanostructure
agagtctgtccattgattagacgagcgccgcgc

SEQ ID NO: 2612 - DNA, 46 bp, Artificial sequence
  artificial DNA molecule for generation of DNA nanostructure
tgagaatcgctttttatatttaactacctttttttttaacctccgg

SEQ ID NO: 2613 - DNA, 40 bp, Artificial sequence
  artificial DNA molecule for generation of DNA nanostructure
aacgccaacatgtaatcaagaacgaatcttacgaacaaga

SEQ ID NO: 2614 - DNA, 47 bp, Artificial sequence
  artificial DNA molecule for generation of DNA nanostructure
ttcagctaatgcagaaagtaattctgaaacagaaggattaccaccgg

SEQ ID NO: 2615 - DNA, 43 bp, Artificial sequence
  artificial DNA molecule for generation of DNA nanostructure
cacggaataaccgaggaaatttttgcaataataacgagttacc

SEQ ID NO: 2616 - DNA, 46 bp, Artificial sequence
  artificial DNA molecule for generation of DNA nanostructure
aaacagtttgccttgataagcgtcatacatggcttttgacacaaac

SEQ ID NO: 2617 - DNA, 40 bp, Artificial sequence
  artificial DNA molecule for generation of DNA nanostructure
gacgacgacaaagcccgagataggttaatgcggagaaagg

SEQ ID NO: 2618 - DNA, 42 bp, Artificial sequence
  artificial DNA molecule for generation of DNA nanostructure
ctttgctcgccgggttacctgcagcgttgcgcctgagagagt

SEQ ID NO: 2619 - DNA, 39 bp, Artificial sequence
  artificial DNA molecule for generation of DNA nanostructure
ctgcctatttcgcgcacaacatgttgggcgcgcggggag

SEQ ID NO: 2620 - DNA, 38 bp, Artificial sequence
  artificial DNA molecule for generation of DNA nanostructure
gttgagtaaagggcgaaaaaccgtctaataaacgtggc

SEQ ID NO: 2621 - DNA, 48 bp, Artificial sequence
  artificial DNA molecule for generation of DNA nanostructure
aaggagcgcgtaaccaccacacccacgtataaggcaaaatgtgagacg

SEQ ID NO: 2622 - DNA, 46 bp, Artificial sequence
  artificial DNA molecule for generation of DNA nanostructure
agtcaatacaacgctaacgatttttcgtctttccagagttttgcac

SEQ ID NO: 2623 - DNA, 48 bp, Artificial sequence
  artificial DNA molecule for generation of DNA nanostructure
gatgaatatacagtaagctgcaaggcgattaagttgggtacgaaacgt

SEQ ID NO: 2624 - DNA, 39 bp, Artificial sequence
  artificial DNA molecule for generation of DNA nanostructure
ctggtctggtcagcagtagctctcacggaaaaagagacg

SEQ ID NO: 2625 - DNA, 43 bp, Artificial sequence
  artificial DNA molecule for generation of DNA nanostructure
ccgctacattgttgcctgagtagagaggcagggcattttcggt

SEQ ID NO: 2626 - DNA, 43 bp, Artificial sequence
  artificial DNA molecule for generation of DNA nanostructure
gggatgtcagtacctttttttttcatcgggagaaattaattaa

SEQ ID NO: 2627 - DNA, 56 bp, Artificial sequence
  artificial DNA molecule for generation of DNA nanostructure
ctgtccataatggaagggttagggaacggaaccaggcggataaaattgagttaagc

SEQ ID NO: 2628 - DNA, 42 bp, Artificial sequence
  artificial DNA molecule for generation of DNA nanostructure
ccttgctaagggaagatttagccactactgattatagacttt

SEQ ID NO: 2629 - DNA, 45 bp, Artificial sequence
  artificial DNA molecule for generation of DNA nanostructure
ggtcataatcaaaatctttcatcgtcagacgacgccaccagaacc

SEQ ID NO: 2630 - DNA, 30 bp, Artificial sequence
  artificial DNA molecule for generation of DNA nanostructure
cagagccaggattagcggggcgcttctgaa

SEQ ID NO: 2631 - DNA, 38 bp, Artificial sequence
  artificial DNA molecule for generation of DNA nanostructure
tcttttaatagcccccttattagcggcctttagcgtca

SEQ ID NO: 2632 - DNA, 48 bp, Artificial sequence
  artificial DNA molecule for generation of DNA nanostructure
acagcgcccaccggaaacaatcggaaggtgccgtcgagagtatcaccg

SEQ ID NO: 2633 - DNA, 38 bp, Artificial sequence
  artificial DNA molecule for generation of DNA nanostructure
tttgtcacaatctttttatagaaaattcatagttgcta

SEQ ID NO: 2634 - DNA, 39 bp, Artificial sequence
  artificial DNA molecule for generation of DNA nanostructure
cagatgatggcaattcccagaaggggggaaagtttgcca

SEQ ID NO: 2635 - DNA, 47 bp, Artificial sequence
  artificial DNA molecule for generation of DNA nanostructure
cggaacaaagaaaccaagcccggatcaagtttccggttttgctcagt

SEQ ID NO: 2636 - DNA, 45 bp, Artificial sequence
  artificial DNA molecule for generation of DNA nanostructure
cgatagcagcactttttgtaaaaccgcctctttttctcagaaatc

SEQ ID NO: 2637 - DNA, 52 bp, Artificial sequence
  artificial DNA molecule for generation of DNA nanostructure
aatataaaattatttgcacgtgcgatatttttcttagattataccgtcgcta

SEQ ID NO: 2638 - DNA, 47 bp, Artificial sequence
  artificial DNA molecule for generation of DNA nanostructure
agaaggactgagactatatcaaagtaccgacaaaaggtaacgcgcct

SEQ ID NO: 2639 - DNA, 44 bp, Artificial sequence
  artificial DNA molecule for generation of DNA nanostructure
gtaaaacgacggccattttttgccaagctttcaggttttcccag

SEQ ID NO: 2640 - DNA, 48 bp, Artificial sequence
  artificial DNA molecule for generation of DNA nanostructure
ttgcgggaaacgagggtagcaacgagtgaatagattttaagaactggc

SEQ ID NO: 2641 - DNA, 43 bp, Artificial sequence
  artificial DNA molecule for generation of DNA nanostructure
tcaaatatccagaacgagtagattaataccgatcgtctgaaat

SEQ ID NO: 2642 - DNA, 48 bp, Artificial sequence
  artificial DNA molecule for generation of DNA nanostructure
caggtctttcaaaaagattaagagcagaccgggagatttaccttatgc

SEQ ID NO: 2643 - DNA, 42 bp, Artificial sequence
  artificial DNA molecule for generation of DNA nanostructure
atcgtcataaatattcattcaaaaattaccagacaggaatta

SEQ ID NO: 2644 - DNA, 48 bp, Artificial sequence
  artificial DNA molecule for generation of DNA nanostructure
tacaggtaggctttgacttgcagggagttaaaggaattgctatcataa

SEQ ID NO: 2645 - DNA, 45 bp, Artificial sequence
  artificial DNA molecule for generation of DNA nanostructure
gcaacgaccagtaataacgctcaaacgaaccaattagtctttaat

SEQ ID NO: 2646 - DNA, 38 bp, Artificial sequence
  artificial DNA molecule for generation of DNA nanostructure
ggtcacgctgcgggcgctatttttggcgctatagataa

SEQ ID NO: 2647 - DNA, 37 bp, Artificial sequence
  artificial DNA molecule for generation of DNA nanostructure
ccaacagacgccagccattgcaatttgagtccgaacg

SEQ ID NO: 2648 - DNA, 47 bp, Artificial sequence
  artificial DNA molecule for generation of DNA nanostructure
gtaagaaagccgtcagttgaaagcccgggtagtttcctgaacatacg

SEQ ID NO: 2649 - DNA, 45 bp, Artificial sequence
  artificial DNA molecule for generation of DNA nanostructure
ttaattcgatgatatcaaaccctcaatcaattgagatggagcctc

SEQ ID NO: 2650 - DNA, 54 bp, Artificial sequence
  artificial DNA molecule for generation of DNA nanostructure
tctaaaatatctgttgcgtccgtgtttaattgtagtaaattgggctgctcacaa

SEQ ID NO: 2651 - DNA, 41 bp, Artificial sequence
  artificial DNA molecule for generation of DNA nanostructure
gaatcagagtttttgggagctaaacaggagggcaagtgtag

SEQ ID NO: 2652 - DNA, 40 bp, Artificial sequence
  artificial DNA molecule for generation of DNA nanostructure
ccctcaaataaaattcaaattgtaaacgttaatttaaaag

SEQ ID NO: 2653 - DNA, 44 bp, Artificial sequence
  artificial DNA molecule for generation of DNA nanostructure
gtcagtattaacaccgccttttttcaacttgtagcaatacttct

SEQ ID NO: 2654 - DNA, 35 bp, Artificial sequence
  artificial DNA molecule for generation of DNA nanostructure
ttcccaattctgcgcagccctaaaacatcgccatt

SEQ ID NO: 2655 - DNA, 38 bp, Artificial sequence
  artificial DNA molecule for generation of DNA nanostructure
cgccaaagacgataaaaaccaaaatagacgcagaaaac

SEQ ID NO: 2656 - DNA, 40 bp, Artificial sequence
  artificial DNA molecule for generation of DNA nanostructure
cagaacgatcaactttaatcattgagctcaacagcttcaa

SEQ ID NO: 2657 - DNA, 44 bp, Artificial sequence
  artificial DNA molecule for generation of DNA nanostructure
gtcggggtcattgcaggcgttttttttcgcactctacggtggtg

SEQ ID NO: 2658 - DNA, 40 bp, Artificial sequence
  artificial DNA molecule for generation of DNA nanostructure
acaggcggcgcggtcctacatttgtagattagtacgtggc

SEQ ID NO: 2659 - DNA, 32 bp, Artificial sequence
  artificial DNA molecule for generation of DNA nanostructure
tcaacgtaacaaagctgctcattcgctacaga

SEQ ID NO: 2660 - DNA, 44 bp, Artificial sequence
  artificial DNA molecule for generation of DNA nanostructure
tgtacatcgacataatttttaaaatcccgtaaaacgccagcagt

SEQ ID NO: 2661 - DNA, 40 bp, Artificial sequence
  artificial DNA molecule for generation of DNA nanostructure
tgcatcagacgatccatgtaaagcggtccacgaatcatgg

SEQ ID NO: 2662 - DNA, 46 bp, Artificial sequence
  artificial DNA molecule for generation of DNA nanostructure
gcggttgcctggtttgcccctttttgcaggcgaaaatcgcctggcc

SEQ ID NO: 2663 - DNA, 34 bp, Artificial sequence
  artificial DNA molecule for generation of DNA nanostructure
tgttctgcagatacataagaaagactgagaatga

SEQ ID NO: 2664 - DNA, 49 bp, Artificial sequence
  artificial DNA molecule for generation of DNA nanostructure
tgccgttccggcaaacctttagttcgacaactcgtagcactaaatcgga

SEQ ID NO: 2665 - DNA, 39 bp, Artificial sequence
  artificial DNA molecule for generation of DNA nanostructure
cagctttcatcaacattaaatgtgagcgagtcagctcat

SEQ ID NO: 2666 - DNA, 43 bp, Artificial sequence
  artificial DNA molecule for generation of DNA nanostructure
cagaaacgacttgtagaatttttgtcagcgtggtgccatccca

SEQ ID NO: 2667 - DNA, 47 bp, Artificial sequence
  artificial DNA molecule for generation of DNA nanostructure
gaataatacagtttcagcggagtgggaacaaacggcggattgaccgt

SEQ ID NO: 2668 - DNA, 46 bp, Artificial sequence
  artificial DNA molecule for generation of DNA nanostructure
ccagcggtgctttttggtgcccccggtattttttgggtaaaggttt

SEQ ID NO: 2669 - DNA, 44 bp, Artificial sequence
  artificial DNA molecule for generation of DNA nanostructure
cgcaaccatttttcttacggctggaggtctgttgccctgcggct

SEQ ID NO: 2670 - DNA, 42 bp, Artificial sequence
  artificial DNA molecule for generation of DNA nanostructure
cgctgaggggactaaagacttttttacccaaagacgttggga

SEQ ID NO: 2671 - DNA, 54 bp, Artificial sequence
  artificial DNA molecule for generation of DNA nanostructure
tgaggatcgaattgagagttggcaatgaaaaatctaaagcatcacctaacagag

SEQ ID NO: 2672 - DNA, 32 bp, Artificial sequence
  artificial DNA molecule for generation of DNA nanostructure
ctcacagtgtttctgcacaactaaaggattta

SEQ ID NO: 2673 - DNA, 38 bp, Artificial sequence
  artificial DNA molecule for generation of DNA nanostructure
agtcacaatttatttacattggcagacgctcatggaaa

SEQ ID NO: 2674 - DNA, 43 bp, Artificial sequence
  artificial DNA molecule for generation of DNA nanostructure
tatttttattctgggaagtattagacgttatgctgatcgtgcc

SEQ ID NO: 2675 - DNA, 48 bp, Artificial sequence
  artificial DNA molecule for generation of DNA nanostructure
tgcggcggccgggtcagtccagcatcagctcgataacggaacgtgccg

SEQ ID NO: 2676 - DNA, 31 bp, Artificial sequence
  artificial DNA molecule for generation of DNA nanostructure
tttttaactattttgttgctttaaattcacc

SEQ ID NO: 2677 - DNA, 52 bp, Artificial sequence
  artificial DNA molecule for generation of DNA nanostructure
tgcagcaagcctggggtgcctaatgagtgagctttttaactcacattaattg

SEQ ID NO: 2678 - DNA, 48 bp, Artificial sequence
  artificial DNA molecule for generation of DNA nanostructure
tgtgaaattgttatccatctggtcgaaggttagtgaggcgacagacaa

SEQ ID NO: 2679 - DNA, 48 bp, Artificial sequence
  artificial DNA molecule for generation of DNA nanostructure
agccggaagcataaaggcgcagtggaattcgtggtatgaggccgtttt

SEQ ID NO: 2680 - DNA, 48 bp, Artificial sequence
  artificial DNA molecule for generation of DNA nanostructure
cctgtagccaaaaataattcgcgtaaattaaatcctttgcaacattat

SEQ ID NO: 2681 - DNA, 32 bp, Artificial sequence
  artificial DNA molecule for generation of DNA nanostructure
gaaagattagtaagagcaatgctttcgaggtg

SEQ ID NO: 2682 - DNA, 37 bp, Artificial sequence
  artificial DNA molecule for generation of DNA nanostructure
caggaaaaacatttacaaacaatgatgaagacgccat

SEQ ID NO: 2683 - DNA, 38 bp, Artificial sequence
  artificial DNA molecule for generation of DNA nanostructure
ctgagaagattaaccgagtgccacgttttttgagagcc

SEQ ID NO: 2684 - DNA, 38 bp, Artificial sequence
  artificial DNA molecule for generation of DNA nanostructure
aagggattttagtttttcaggaacggtacgccttcacc

SEQ ID NO: 2685 - DNA, 48 bp, Artificial sequence
  artificial DNA molecule for generation of DNA nanostructure
catatccagaacaattttttttacgatagaacctttttttctgatcgg

SEQ ID NO: 2686 - DNA, 51 bp, Artificial sequence
  artificial DNA molecule for generation of DNA nanostructure
tacctacattttgaaagggacgaatggctcgcttaggagcactacagcacg

SEQ ID NO: 2687 - DNA, 25 bp, Artificial sequence
  artificial DNA molecule for generation of DNA nanostructure
aaatagtttgaccatcatccaataa

SEQ ID NO: 2688 - DNA, 32 bp, Artificial sequence
  artificial DNA molecule for generation of DNA nanostructure
tatgcaactaacagttgaagcgaacgaagccc

SEQ ID NO: 2689 - DNA, 48 bp, Artificial sequence
  artificial DNA molecule for generation of DNA nanostructure
agcagcaaaatcaacagccgattatcatagctccgagctctcactgcg

SEQ ID NO: 2690 - DNA, 41 bp, Artificial sequence
  artificial DNA molecule for generation of DNA nanostructure
gcgcgaactgatagaagataatgctgaacctcaattttaaa

SEQ ID NO: 2691 - DNA, 31 bp, Artificial sequence
  artificial DNA molecule for generation of DNA nanostructure
ccatataaagtacggttgaatataatgctgt

SEQ ID NO: 2692 - DNA, 72 bp, Artificial sequence
  artificial DNA molecule for generation of DNA nanostructure
gcagtagagtaggtagagattaggcaaagccccattttcagggataccgtcgccattcaggctgcgcaactg

SEQ ID NO: 2693 - DNA, 70 bp, Artificial sequence
  artificial DNA molecule for generation of DNA nanostructure
gcagtagagtaggtagagattaggcaaatatttgcattaaattgtttagactgtttttataggcatcgta

SEQ ID NO: 2694 - DNA, 66 bp, Artificial sequence
  artificial DNA molecule for generation of DNA nanostructure
gcagtagagtaggtagagattaggcaggtgcgggcctcttcgtgattgctgggtaatttaacataa

SEQ ID NO: 2695 - DNA, 80 bp, Artificial sequence
  artificial DNA molecule for generation of DNA nanostructure
gcagtagagtaggtagagattaggcaataagtatatcaatataatccctatgtttaccagtcccggaatttgtgagagat

SEQ ID NO: 2696 - DNA, 66 bp, Artificial sequence
  artificial DNA molecule for generation of DNA nanostructure
gcagtagagtaggtagagattaggcactccgtggtgaagggacaaccgcatcacccaacgtggact

SEQ ID NO: 2697 - DNA, 29 bp, Artificial sequence
  artificial DNA molecule for generation of DNA nanostructure
tcagtagcgacagaaataggtgggttgat

SEQ ID NO: 2698 - DNA, 70 bp, Artificial sequence
  artificial DNA molecule for generation of DNA nanostructure
gcagtagagtaggtagagattaggcatactcagccctcagaacagagagataatttttccacacgccagg

SEQ ID NO: 2699 - DNA, 66 bp, Artificial sequence
  artificial DNA molecule for generation of DNA nanostructure
gcagtagagtaggtagagattaggcattattaatcaataggaggtaaagttaacgagaggcttttg

SEQ ID NO: 2700 - DNA, 71 bp, Artificial sequence
  artificial DNA molecule for generation of DNA nanostructure
gcagtagagtaggtagagattaggcacattttgtatcatcatatgggtcgaggttttttccgttcatttgc

SEQ ID NO: 2701 - DNA, 42 bp, Artificial sequence
  artificial DNA molecule for generation of DNA nanostructure
acatttcccataaatgaatcccaaaagagttaaataacaacc

SEQ ID NO: 2702 - DNA, 66 bp, Artificial sequence
  artificial DNA molecule for generation of DNA nanostructure
gcagtagagtaggtagagattaggcacgtcggattctccgtgagaatagacagaggggccctcgtt

SEQ ID NO: 2703 - DNA, 44 bp, Artificial sequence
  artificial DNA molecule for generation of DNA nanostructure
aatatttgcattaaattgtttagactgtttttataggcatcgta

SEQ ID NO: 2704 - DNA, 46 bp, Artificial sequence
  artificial DNA molecule for generation of DNA nanostructure
aagccccattttcagggataccgtcgccattcaggctgcgcaactg

SEQ ID NO: 2705 - DNA, 40 bp, Artificial sequence
  artificial DNA molecule for generation of DNA nanostructure
ggtgcgggcctcttcgtgattgctgggtaatttaacataa

SEQ ID NO: 2706 - DNA, 46 bp, Artificial sequence
  artificial DNA molecule for generation of DNA nanostructure
atcaatataatccctatgtttaccagtcccggaatttgtgagagat

SEQ ID NO: 2707 - DNA, 40 bp, Artificial sequence
  artificial DNA molecule for generation of DNA nanostructure
ctccgtggtgaagggacaaccgcatcacccaacgtggact

SEQ ID NO: 2708 - DNA, 37 bp, Artificial sequence
  artificial DNA molecule for generation of DNA nanostructure
tcagtagcgacagaaataggtgggttgatataagtat

SEQ ID NO: 2709 - DNA, 44 bp, Artificial sequence
  artificial DNA molecule for generation of DNA nanostructure
tactcagccctcagaacagagagataatttttccacacgccagg

SEQ ID NO: 2710 - DNA, 40 bp, Artificial sequence
  artificial DNA molecule for generation of DNA nanostructure
ttattaatcaataggaggtaaagttaacgagaggcttttg

SEQ ID NO: 2711 - DNA, 45 bp, Artificial sequence
  artificial DNA molecule for generation of DNA nanostructure
cattttgtatcatcatatgggtcgaggttttttccgttcatttgc

SEQ ID NO: 2712 - DNA, 35 bp, Artificial sequence
  artificial DNA molecule for generation of DNA nanostructure
acatttcccataaatgaatcccaaaagagttaaat

SEQ ID NO: 2713 - DNA, 47 bp, Artificial sequence
  artificial DNA molecule for generation of DNA nanostructure
aacaacccgtcggattctccgtgagaatagacagaggggccctcgtt

SEQ ID NO: 2714 - DNA, 45 bp, Artificial sequence
  artificial DNA molecule for generation of DNA nanostructure
gcgaacactcatctttaataaacaaacatcaagaaaacaaaatta

SEQ ID NO: 2715 - DNA, 45 bp, Artificial sequence
  artificial DNA molecule for generation of DNA nanostructure
aagaatacactaaagagtttgaaataccgaccgtgtgataaataa

SEQ ID NO: 2716 - DNA, 40 bp, Artificial sequence
  artificial DNA molecule for generation of DNA nanostructure
aatcaatatgagcaaaatggaaaccaaaatcgttgggaag

SEQ ID NO: 2717 - DNA, 40 bp, Artificial sequence
  artificial DNA molecule for generation of DNA nanostructure
attatttattttagaatccaagcctgtttagtatcatatg

SEQ ID NO: 2718 - DNA, 37 bp, Artificial sequence
  artificial DNA molecule for generation of DNA nanostructure
ggcgttaaataaggacccccaacagccctgagtttcg

SEQ ID NO: 2719 - DNA, 37 bp, Artificial sequence
  artificial DNA molecule for generation of DNA nanostructure
tttgtttaagcgcatatgtgaccaagttaagtacata

SEQ ID NO: 2720 - DNA, 37 bp, Artificial sequence
  artificial DNA molecule for generation of DNA nanostructure
attacatttaacattgtcgtcagcgccatcttctggt

SEQ ID NO: 2721 - DNA, 37 bp, Artificial sequence
  artificial DNA molecule for generation of DNA nanostructure
tgggcggttgatcaagttttttgtccgtgaaccaaga

SEQ ID NO: 2722 - DNA, 37 bp, Artificial sequence
  artificial DNA molecule for generation of DNA nanostructure
ccagtaataagagatcaaaatataaaaacagaaataa

SEQ ID NO: 2723 - DNA, 45 bp, Artificial sequence
  artificial DNA molecule for generation of DNA nanostructure
gtaacagtaagtttataaaataatacaatagaaggcattttcgag

SEQ ID NO: 2724 - DNA, 45 bp, Artificial sequence
  artificial DNA molecule for generation of DNA nanostructure
accctaaagggagcccccgaaagcgaccaacgtcgttgttccgtg

SEQ ID NO: 2725 - DNA, 40 bp, Artificial sequence
  artificial DNA molecule for generation of DNA nanostructure
ttcaggttccgccacgaacctacccctcaagatgaaagta

SEQ ID NO: 2726 - DNA, 32 bp, Artificial sequence
  artificial DNA molecule for generation of DNA nanostructure
aggtggagtaacgtcaagaaattgcgtagatt

SEQ ID NO: 2727 - DNA, 43 bp, Artificial sequence
  artificial DNA molecule for generation of DNA nanostructure
atgccaacggcacactggtagtttggaccgaaatccgtgcttt

SEQ ID NO: 2728 - DNA, 51 bp, Artificial sequence
  artificial DNA molecule for generation of DNA nanostructure
ttcagcaaatcaacctgtcggcaacagctgattgcccagaatccctcgtta

SEQ ID NO: 2729 - DNA, 38 bp, Artificial sequence
  artificial DNA molecule for generation of DNA nanostructure
tgaattaggaatacagcatcggtcgtcaccctcagcag

SEQ ID NO: 2730 - DNA, 37 bp, Artificial sequence
  artificial DNA molecule for generation of DNA nanostructure
tgccagtttggtaatagtaaaattttagttttgcaag

SEQ ID NO: 2731 - DNA, 48 bp, Artificial sequence
  artificial DNA molecule for generation of DNA nanostructure
aaagccgcacatcctctcgctggcagcctccgggtgctgctaccgggg

SEQ ID NO: 2732 - DNA, 40 bp, Artificial sequence
  artificial DNA molecule for generation of DNA nanostructure
agcggatcaaacttaaatttctgcctggccttgccagagc

SEQ ID NO: 2733 - DNA, 47 bp, Artificial sequence
  artificial DNA molecule for generation of DNA nanostructure
aggcttgccctgacgagaaacaccgaaagaccacattcaactaattc

SEQ ID NO: 2734 - DNA, 35 bp, Artificial sequence
  artificial DNA molecule for generation of DNA nanostructure
gaacaactaaaggccgcttcgaggcatcatcagtt

SEQ ID NO: 2735 - DNA, 48 bp, Artificial sequence
  artificial DNA molecule for generation of DNA nanostructure
gttttttccacggtcaggccagaacgcctgtgcactctgtttccacac

SEQ ID NO: 2736 - DNA, 50 bp, Artificial sequence
  artificial DNA molecule for generation of DNA nanostructure
gcgaacactcatctttaataaacaaacatcaagaaaacaaaattattttt

SEQ ID NO: 2737 - DNA, 50 bp, Artificial sequence
  artificial DNA molecule for generation of DNA nanostructure
aagaatacactaaagagtttgaaataccgaccgtgtgataaataattttt

SEQ ID NO: 2738 - DNA, 45 bp, Artificial sequence
  artificial DNA molecule for generation of DNA nanostructure
tttttaatcaatatgagcaaaatggaaaccaaaatcgttgggaag

SEQ ID NO: 2739 - DNA, 45 bp, Artificial sequence
  artificial DNA molecule for generation of DNA nanostructure
attatttattttagaatccaagcctgtttagtatcatatgttttt

SEQ ID NO: 2740 - DNA, 42 bp, Artificial sequence
  artificial DNA molecule for generation of DNA nanostructure
tttttggcgttaaataaggacccccaacagccctgagtttcg

SEQ ID NO: 2741 - DNA, 42 bp, Artificial sequence
  artificial DNA molecule for generation of DNA nanostructure
tttgtttaagcgcatatgtgaccaagttaagtacatattttt

SEQ ID NO: 2742 - DNA, 42 bp, Artificial sequence
  artificial DNA molecule for generation of DNA nanostructure
tttttattacatttaacattgtcgtcagcgccatcttctggt

SEQ ID NO: 2743 - DNA, 42 bp, Artificial sequence
  artificial DNA molecule for generation of DNA nanostructure
tgggcggttgatcaagttttttgtccgtgaaccaagattttt

SEQ ID NO: 2744 - DNA, 42 bp, Artificial sequence
  artificial DNA molecule for generation of DNA nanostructure
tttttccagtaataagagatcaaaatataaaaacagaaataa

SEQ ID NO: 2745 - DNA, 50 bp, Artificial sequence
  artificial DNA molecule for generation of DNA nanostructure
gtaacagtaagtttataaaataatacaatagaaggcattttcgagttttt

SEQ ID NO: 2746 - DNA, 50 bp, Artificial sequence
  artificial DNA molecule for generation of DNA nanostructure
accctaaagggagcccccgaaagcgaccaacgtcgttgttccgtgttttt

SEQ ID NO: 2747 - DNA, 45 bp, Artificial sequence
  artificial DNA molecule for generation of DNA nanostructure
tttttttcaggttccgccacgaacctacccctcaagatgaaagta

SEQ ID NO: 2748 - DNA, 37 bp, Artificial sequence
  artificial DNA molecule for generation of DNA nanostructure
aggtggagtaacgtcaagaaattgcgtagattttttt

SEQ ID NO: 2749 - DNA, 48 bp, Artificial sequence
  artificial DNA molecule for generation of DNA nanostructure
tttttatgccaacggcacactggtagtttggaccgaaatccgtgcttt

SEQ ID NO: 2750 - DNA, 56 bp, Artificial sequence
  artificial DNA molecule for generation of DNA nanostructure
tttttttcagcaaatcaacctgtcggcaacagctgattgcccagaatccctcgtta

SEQ ID NO: 2751 - DNA, 43 bp, Artificial sequence
  artificial DNA molecule for generation of DNA nanostructure
tgaattaggaatacagcatcggtcgtcaccctcagcagttttt

SEQ ID NO: 2752 - DNA, 42 bp, Artificial sequence
  artificial DNA molecule for generation of DNA nanostructure
tgccagtttggtaatagtaaaattttagttttgcaagttttt

SEQ ID NO: 2753 - DNA, 48 bp, Artificial sequence; identical to SEQ ID NO: 2731
  artificial DNA molecule for generation of DNA nanostructure

SEQ ID NO: 2754 - DNA, 40 bp, Artificial sequence; identical to SEQ ID NO: 2732
  artificial DNA molecule for generation of DNA nanostructure

SEQ ID NO: 2755 - DNA, 47 bp, Artificial sequence; identical to SEQ ID NO: 2733
  artificial DNA molecule for generation of DNA nanostructure

SEQ ID NO: 2756 - DNA, 40 bp, Artificial sequence
  artificial DNA molecule for generation of DNA nanostructure
tttttgaacaactaaaggccgcttcgaggcatcatcagtt

SEQ ID NO: 2757 - DNA, 48 bp, Artificial sequence; identical to SEQ ID NO: 2735
  artificial DNA molecule for generation of DNA nanostructure

SEQ ID NO: 2758 - DNA, 41 bp, Artificial sequence
  artificial DNA molecule for generation of DNA nanostructure
tgaattaggaatacagcatcggtcgtcaccctcagcagcag

SEQ ID NO: 2759 - DNA, 40 bp, Artificial sequence
  artificial DNA molecule for generation of DNA nanostructure
tgccagtttggtaatagtaaaattttagttttgcaagcca

SEQ ID NO: 2760 - DNA, 35 bp, Artificial sequence
  artificial DNA molecule for generation of DNA nanostructure
aaagccgcacatcctctcgctggcagcctccgttt

SEQ ID NO: 2761 - DNA, 32 bp, Artificial sequence
  artificial DNA molecule for generation of DNA nanostructure
agcggatcaaacttaaatttctgcctggcctt

SEQ ID NO: 2762 - DNA, 51 bp, Artificial sequence
  artificial DNA molecule for generation of DNA nanostructure
tgcgccagagcacaggcggcgcggtcctacatttgtagattagtacgtggc

SEQ ID NO: 2763 - DNA, 38 bp, Artificial sequence
  artificial DNA molecule for generation of DNA nanostructure
taagaacaactaaaggccgcttcgaggcatcatcagtt

SEQ ID NO: 2764 - DNA, 30 bp, Artificial sequence
  artificial DNA molecule for generation of DNA nanostructure
atgaaaaatctaaagcatcacctaacagag

SEQ ID NO: 2765 - DNA, 43 bp, Artificial sequence
  artificial DNA molecule for generation of DNA nanostructure
acgggtgctgctaccggggtgaggatcgaattgagagttggca

SEQ ID NO: 2766 - DNA, 40 bp, Artificial sequence
  artificial DNA molecule for generation of DNA nanostructure
ggaggtgtggttgcggacgcagaaaacggatagttgggta

SEQ ID NO: 2767 - DNA, 40 bp, Artificial sequence
  artificial DNA molecule for generation of DNA nanostructure
gtcaaaggcagtttgggtagaacggtagggggtttctgcc

SEQ ID NO: 2768 - DNA, 39 bp, Artificial sequence
  artificial DNA molecule for generation of DNA nanostructure
ctcagagcataaagcttaagaaaagtaagcagatagccg

SEQ ID NO: 2769 - DNA, 38 bp, Artificial sequence
  artificial DNA molecule for generation of DNA nanostructure
ctccggcttaggttttttgggttatataacgaattatc

SEQ ID NO: 2770 - DNA, 39 bp, Artificial sequence
  artificial DNA molecule for generation of DNA nanostructure
atcccatcatcggctgaccgacaattaggcagaggcatt

SEQ ID NO: 2771 - DNA, 42 bp, Artificial sequence
  artificial DNA molecule for generation of DNA nanostructure
gagcacatcctcataacgaccgcaagagccgcaccagttggg

SEQ ID NO: 2772 - DNA, 32 bp, Artificial sequence
  artificial DNA molecule for generation of DNA nanostructure
agagagaaattgagttaagcccaagagataac

SEQ ID NO: 2773 - DNA, 39 bp, Artificial sequence
  artificial DNA molecule for generation of DNA nanostructure
tcattgcaagtctctgtggtgctgcggccagaatgccat

SEQ ID NO: 2774 - DNA, 40 bp, Artificial sequence
  artificial DNA molecule for generation of DNA nanostructure
attaacaccgcttctgctcatttgcagcgggggtctggtc

SEQ ID NO: 2775 - DNA, 41 bp, Artificial sequence
  artificial DNA molecule for generation of DNA nanostructure
ccaaaagaacaacgcggtccgttaaggattgccgtgtacca

SEQ ID NO: 2776 - DNA, 37 bp, Artificial sequence
  artificial DNA molecule for generation of DNA nanostructure
ggcattccaagaacgggtcagtaccatcacccaaatc

SEQ ID NO: 2777 - DNA, 37 bp, Artificial sequence
  artificial DNA molecule for generation of DNA nanostructure
atgcgttatacaaatagaacgctagaaggcttatccg

SEQ ID NO: 2778 - DNA, 46 bp, Artificial sequence
  artificial DNA molecule for generation of DNA nanostructure
aatcaatactaatttaaatgcagaacgcgcctgtttatcataaagt

SEQ ID NO: 2779 - DNA, 40 bp, Artificial sequence
  artificial DNA molecule for generation of DNA nanostructure
aaaacgacgttggcaaatcaacagaatcaatatctggtca

SEQ ID NO: 2780 - DNA, 32 bp, Artificial sequence
  artificial DNA molecule for generation of DNA nanostructure
gtaattgaaagtttttcaagcaagaccaagta

SEQ ID NO: 2781 - DNA, 56 bp, Artificial sequence
  artificial DNA molecule for generation of DNA nanostructure
ttaacgtctttttaaaatgaagggagccccctttttatttagagcttggtttttat

SEQ ID NO: 2782 - DNA, 30 bp, Artificial sequence
  artificial DNA molecule for generation of DNA nanostructure
ctcaacaattttcatcgtagcgctacgtga

SEQ ID NO: 2783 - DNA, 32 bp, Artificial sequence
  artificial DNA molecule for generation of DNA nanostructure
tcacggtcatacctaaagccaacgttcgagcc

SEQ ID NO: 2784 - DNA, 38 bp, Artificial sequence
  artificial DNA molecule for generation of DNA nanostructure
tatatgtagaatttatcaaaatcattttttggtctgag

SEQ ID NO: 2785 - DNA, 34 bp, Artificial sequence
  artificial DNA molecule for generation of DNA nanostructure
gcgctaatgcgcccaatagcacctgagcaaaaga

SEQ ID NO: 2786 - DNA, 52 bp, Artificial sequence
  artificial DNA molecule for generation of DNA nanostructure
agatgatggctctttaggagcactaacaactattttttagattagagccgtc

SEQ ID NO: 2787 - DNA, 39 bp, Artificial sequence
  artificial DNA molecule for generation of DNA nanostructure
acgccaaccgcactctagaaacctgaaaaataaaccctc

SEQ ID NO: 2788 - DNA, 44 bp, Artificial sequence
  artificial DNA molecule for generation of DNA nanostructure
catgtaataaggtaaagtaattctgtctttttagactttcatct

SEQ ID NO: 2789 - DNA, 42 bp, Artificial sequence
  artificial DNA molecule for generation of DNA nanostructure
cctgagagatcaaaaataattcgccgccagctcgccatgttt

SEQ ID NO: 2790 - DNA, 38 bp, Artificial sequence
  artificial DNA molecule for generation of DNA nanostructure
ttcgcactgtttcctgaacaagaaaaataatggccagt

SEQ ID NO: 2791 - DNA, 46 bp, Artificial sequence
  artificial DNA molecule for generation of DNA nanostructure
ttttgaatggttttttattagtctagtatttttaagaactcaaact

SEQ ID NO: 2792 - DNA, 39 bp, Artificial sequence
  artificial DNA molecule for generation of DNA nanostructure
ttccggcagtaaaaaaaatgccaattacggctagctgtt

SEQ ID NO: 2793 - DNA, 40 bp, Artificial sequence
  artificial DNA molecule for generation of DNA nanostructure
gggatagcggaacgcctctggagcaaacaagaaaaggccg

SEQ ID NO: 2794 - DNA, 32 bp, Artificial sequence
  artificial DNA molecule for generation of DNA nanostructure
tctcacggtacatcgacatggagagggtagct

SEQ ID NO: 2795 - DNA, 48 bp, Artificial sequence
  artificial DNA molecule for generation of DNA nanostructure
gcgcgcctgtgcaaataagagaataacaatagataagacctgcagcca

SEQ ID NO: 2796 - DNA, 43 bp, Artificial sequence
  artificial DNA molecule for generation of DNA nanostructure
agactaccgagtgaataactttttttgcttctgtaaaaatcaa

SEQ ID NO: 2797 - DNA, 38 bp, Artificial sequence
  artificial DNA molecule for generation of DNA nanostructure
tctttccttatcgctcaacagtggccaagctacgttgt

SEQ ID NO: 2798 - DNA, 47 bp, Artificial sequence
  artificial DNA molecule for generation of DNA nanostructure
ccacgctgagagccaggtgaggcggtattaaccgtttttgtagggct

SEQ ID NO: 2799 - DNA, 44 bp, Artificial sequence
  artificial DNA molecule for generation of DNA nanostructure
tcaccttgccgaacgaaccaccagaggacgcaaattaaccgttg

SEQ ID NO: 2800 - DNA, 48 bp, Artificial sequence
  artificial DNA molecule for generation of DNA nanostructure
aacaacatgttcagctcgagcatgtttttaaccaaatatcctaaagca

SEQ ID NO: 2801 - DNA, 35 bp, Artificial sequence
  artificial DNA molecule for generation of DNA nanostructure
gcggtgctgtcactcgggcgcccagcatccgccag

SEQ ID NO: 2802 - DNA, 44 bp, Artificial sequence
  artificial DNA molecule for generation of DNA nanostructure
cggtgccctcgttaacggcatcaccacgggacagcggtttgtta

SEQ ID NO: 2803 - DNA, 40 bp, Artificial sequence
  artificial DNA molecule for generation of DNA nanostructure
ttaatgcgcgaactgactaaaataaattcatcctgaacct

SEQ ID NO: 2804 - DNA, 52 bp, Artificial sequence
  artificial DNA molecule for generation of DNA nanostructure
aatatacacgggagaattaactgtttttacaccctgaacaaaaaacagggaa

SEQ ID NO: 2805 - DNA, 46 bp, Artificial sequence
  artificial DNA molecule for generation of DNA nanostructure
aataaataaatataatcctgtttttttgtttggattatatcatatt

SEQ ID NO: 2806 - DNA, 45 bp, Artificial sequence
  artificial DNA molecule for generation of DNA nanostructure
agcctgtttagtttttttcattaattgagattttttcgccaaata

SEQ ID NO: 2807 - DNA, 47 bp, Artificial sequence
  artificial DNA molecule for generation of DNA nanostructure
tatatgtatcgagaatggggtcgcagaagataaaacagagcagcaaa

SEQ ID NO: 2808 - DNA, 44 bp, Artificial sequence
  artificial DNA molecule for generation of DNA nanostructure
aatcagtgtttttggccaccgagtaaaaaaacatcacttgcctg

SEQ ID NO: 2809 - DNA, 32 bp, Artificial sequence
  artificial DNA molecule for generation of DNA nanostructure
ggcgaaagggggatgtgctgcaagaaccaata

SEQ ID NO: 2810 - DNA, 39 bp, Artificial sequence
  artificial DNA molecule for generation of DNA nanostructure
acgccagggttttcctgataatcatcaaacttaaatctg

SEQ ID NO: 2811 - DNA, 48 bp, Artificial sequence
  artificial DNA molecule for generation of DNA nanostructure
tttttcataggtttaggcccgtataaacagttttgacaggtctttgac

SEQ ID NO: 2812 - DNA, 36 bp, Artificial sequence
  artificial DNA molecule for generation of DNA nanostructure
tttgaaagagttaaccctcgtttaccagacgacgat

SEQ ID NO: 2813 - DNA, 47 bp, Artificial sequence
  artificial DNA molecule for generation of DNA nanostructure
accgtcgccctgagatagcattacggcggattgaccgtaagtttgag

SEQ ID NO: 2814 - DNA, 48 bp, Artificial sequence
  artificial DNA molecule for generation of DNA nanostructure
cactacggggttgccctgatagctgcattaatgaatcggcctaaccga

SEQ ID NO: 2815 - DNA, 41 bp, Artificial sequence
  artificial DNA molecule for generation of DNA nanostructure
ttccattataaattgggtcaggacacaggtagaggtcttta

SEQ ID NO: 2816 - DNA, 39 bp, Artificial sequence
  artificial DNA molecule for generation of DNA nanostructure
ccacgcagtgccggaaaccaggctccggcaccgcttctg

SEQ ID NO: 2817 - DNA, 37 bp, Artificial sequence
  artificial DNA molecule for generation of DNA nanostructure
gataccgatagttgcgccgacaaaggctgagtaatgc

SEQ ID NO: 2818 - DNA, 32 bp, Artificial sequence
  artificial DNA molecule for generation of DNA nanostructure
cttgctttcgaggtgaatttcttatactcagg

SEQ ID NO: 2819 - DNA, 51 bp, Artificial sequence
  artificial DNA molecule for generation of DNA nanostructure
gaacaaaacatccaataaatctgatatttttattaatgccaaagagacagt

SEQ ID NO: 2820 - DNA, 51 bp, Artificial sequence
  artificial DNA molecule for generation of DNA nanostructure
agataaggcaccaacctctgctcatgtgtacagagcaacactatcatgagg

SEQ ID NO: 2821 - DNA, 47 bp, Artificial sequence
  artificial DNA molecule for generation of DNA nanostructure
tacaagctgatgaacgtcagtgaaacacaactaatcgccaaaaggaa

SEQ ID NO: 2822 - DNA, 42 bp, Artificial sequence
  artificial DNA molecule for generation of DNA nanostructure
attctactaaaatacacgaaaatcctgttcagcctccggcca

SEQ ID NO: 2823 - DNA, 42 bp, Artificial sequence
  artificial DNA molecule for generation of DNA nanostructure
cggaacaagatttacaccagaaacaaagaaaacgaaagcgcg

SEQ ID NO: 2824 - DNA, 38 bp, Artificial sequence
  artificial DNA molecule for generation of DNA nanostructure
atcagttgacattattgttgggaagaaaaatgggagtt

SEQ ID NO: 2825 - DNA, 46 bp, Artificial sequence
  artificial DNA molecule for generation of DNA nanostructure
gtctggcctttttttctgtagccaaaggttttttatcaggtcattg

SEQ ID NO: 2826 - DNA, 40 bp, Artificial sequence
  artificial DNA molecule for generation of DNA nanostructure
gctttcatcaacattagcgcaactgaatttgtggaagatc

SEQ ID NO: 2827 - DNA, 48 bp, Artificial sequence
  artificial DNA molecule for generation of DNA nanostructure
ggaataccacatttacgagccggaacctgtcgtgccaaaacgaactaa

SEQ ID NO: 2828 - DNA, 52 bp, Artificial sequence
  artificial DNA molecule for generation of DNA nanostructure
aaaatccctggcatgattaagactttttccttattacgcagtaacggaatac

SEQ ID NO: 2829 - DNA, 40 bp, Artificial sequence
  artificial DNA molecule for generation of DNA nanostructure
ttacgggaatcaacgtacgagtagaacgggtaaaaggccg

SEQ ID NO: 2830 - DNA, 52 bp, Artificial sequence
  artificial DNA molecule for generation of DNA nanostructure
tgaaattggcctggggtgcctaatgagtttttgagcagacgatccagcgcag

SEQ ID NO: 2831 - DNA, 30 bp, Artificial sequence
  artificial DNA molecule for generation of DNA nanostructure
gcaaaatcttagctatatttataaccacgg

SEQ ID NO: 2832 - DNA, 42 bp, Artificial sequence
  artificial DNA molecule for generation of DNA nanostructure
taaaggtgaaaatccgcgacctgcattgataaatccgcctcc

SEQ ID NO: 2833 - DNA, 39 bp, Artificial sequence
  artificial DNA molecule for generation of DNA nanostructure
tcctgtgccgcctgggtattggggggacgacgccagctt

SEQ ID NO: 2834 - DNA, 43 bp, Artificial sequence
  artificial DNA molecule for generation of DNA nanostructure
atcccctccacacataagagacgggcaacggtcacgggcatca

SEQ ID NO: 2835 - DNA, 37 bp, Artificial sequence
  artificial DNA molecule for generation of DNA nanostructure
gggtacctccacgctggttacagaaaaggtttggtgt

SEQ ID NO: 2836 - DNA, 39 bp, Artificial sequence
  artificial DNA molecule for generation of DNA nanostructure
aaccgtgcatctgccatgggataagctgattgcaagcgg

SEQ ID NO: 2837 - DNA, 49 bp, Artificial sequence
  artificial DNA molecule for generation of DNA nanostructure
cggtttgcaggtttctgcactccagacagtatcggcctcatctccgtgg

SEQ ID NO: 2838 - DNA, 46 bp, Artificial sequence
  artificial DNA molecule for generation of DNA nanostructure
attttgatgagagatagactttttttctccgtggtgaaacgtacag

SEQ ID NO: 2839 - DNA, 37 bp, Artificial sequence
  artificial DNA molecule for generation of DNA nanostructure
gagctcgattcgcgtccgtgagcatcaaaagaaatcg

SEQ ID NO: 2840 - DNA, 46 bp, Artificial sequence
  artificial DNA molecule for generation of DNA nanostructure
tcagcaaacctgcatctaactcacattttttaattgcgttgcgctc

SEQ ID NO: 2841 - DNA, 44 bp, Artificial sequence
  artificial DNA molecule for generation of DNA nanostructure
catcaatatttttgatattcaaccgttctcgtgagagatctaca

SEQ ID NO: 2842 - DNA, 45 bp, Artificial sequence
  artificial DNA molecule for generation of DNA nanostructure
agcacgcgtgcctttttgttcattcgtaattttttatggtggcgg

SEQ ID NO: 2843 - DNA, 32 bp, Artificial sequence
  artificial DNA molecule for generation of DNA nanostructure
gaggaagtcactaaaacacaagcgtcatacat

SEQ ID NO: 2844 - DNA, 38 bp, Artificial sequence
  artificial DNA molecule for generation of DNA nanostructure
tggtgtgtgggtcactgttgccctgtttttggctggta

SEQ ID NO: 2845 - DNA, 38 bp, Artificial sequence
  artificial DNA molecule for generation of DNA nanostructure
ttgctcgtcatatttttacatcccttacactcggcgaa

SEQ ID NO: 2846 - DNA, 42 bp, Artificial sequence
  artificial DNA molecule for generation of DNA nanostructure
acggtcaatcataagggagcataggcattataccaagaggca

SEQ ID NO: 2847 - DNA, 44 bp, Artificial sequence
  artificial DNA molecule for generation of DNA nanostructure
accgaaccatcgccttcgcaaatagaaaattcatatggtttacc

SEQ ID NO: 2848 - DNA, 39 bp, Artificial sequence
  artificial DNA molecule for generation of DNA nanostructure
aacgcgcgtggtttttagtgtaaattatccgctcacaat

SEQ ID NO: 2849 - DNA, 52 bp, Artificial sequence
  artificial DNA molecule for generation of DNA nanostructure
accagtcccggttgggaagggcgatcggtgcgtttttgcctcttcgctatta

SEQ ID NO: 2850 - DNA, 39 bp, Artificial sequence
  artificial DNA molecule for generation of DNA nanostructure
cttttcaccagtggccgcatcgttatattcgaccatcgc

SEQ ID NO: 2851 - DNA, 47 bp, Artificial sequence
  artificial DNA molecule for generation of DNA nanostructure
gtcatagctgtgtcgaccccagcgtggctgacttacccaatagcgtc

SEQ ID NO: 2852 - DNA, 39 bp, Artificial sequence
  artificial DNA molecule for generation of DNA nanostructure
ttcatcggcattttcgagcgccaaagacaaaagggcgac

SEQ ID NO: 2853 - DNA, 43 bp, Artificial sequence
  artificial DNA molecule for generation of DNA nanostructure
atgggtaagtggtgccatctttttcacgcaaccagccggcagc

SEQ ID NO: 2854 - DNA, 46 bp, Artificial sequence
  artificial DNA molecule for generation of DNA nanostructure
cgccaggggggagaggactgcccgctttccagtcgggaaagcataa

SEQ ID NO: 2855 - DNA, 43 bp, Artificial sequence
  artificial DNA molecule for generation of DNA nanostructure
aacaaagattagcaaaattttttaagcaataaagccaaatcac

SEQ ID NO: 2856 - DNA, 48 bp, Artificial sequence
  artificial DNA molecule for generation of DNA nanostructure
gcaaagacaaggtggcaacatatatggtgatggtggttccgaatagcc

SEQ ID NO: 2857 - DNA, 47 bp, Artificial sequence
  artificial DNA molecule for generation of DNA nanostructure
taatttgccagttacaaaataaaaaggagcgttagattcgcctgatt

SEQ ID NO: 2858 - DNA, 56 bp, Artificial sequence
  artificial DNA molecule for generation of DNA nanostructure
ggtaaatagcgtctttccgtaatcgccagcaaaccatcgatttgcggatgctcctt

SEQ ID NO: 2859 - DNA, 43 bp, Artificial sequence
  artificial DNA molecule for generation of DNA nanostructure
attcaactttagcgtcagtttttctgtagcgcgttgcaggtca

SEQ ID NO: 2860 - DNA, 39 bp, Artificial sequence
  artificial DNA molecule for generation of DNA nanostructure
gagaaaggacaggaacggtacgcaacaatatttttcagg

SEQ ID NO: 2861 - DNA, 44 bp, Artificial sequence
  artificial DNA molecule for generation of DNA nanostructure
acaaataactctgaatttatttttcgttccagttcaaggttgag

SEQ ID NO: 2862 - DNA, 48 bp, Artificial sequence
  artificial DNA molecule for generation of DNA nanostructure
tttgcacccagctacagaggttttaattacataaaaattactagaaaa

SEQ ID NO: 2863 - DNA, 34 bp, Artificial sequence
  artificial DNA molecule for generation of DNA nanostructure
gcgcattagatcgcgcagaggcgtagataccaag

SEQ ID NO: 2864 - DNA, 44 bp, Artificial sequence
  artificial DNA molecule for generation of DNA nanostructure
gacgattgtttttccttgatattcacaactggtaataagtttta

SEQ ID NO: 2865 - DNA, 42 bp, Artificial sequence
  artificial DNA molecule for generation of DNA nanostructure
atcggcctgtggcacagacaatataatagatacctgattatc

SEQ ID NO: 2866 - DNA, 48 bp, Artificial sequence
  artificial DNA molecule for generation of DNA nanostructure
taccgccaagaacccttctgaccttagactttaccaccagaaggagcg

SEQ ID NO: 2867 - DNA, 40 bp, Artificial sequence
  artificial DNA molecule for generation of DNA nanostructure
aaaacgctctataaaacagaaataccttagaatgaattac

SEQ ID NO: 2868 - DNA, 40 bp, Artificial sequence
  artificial DNA molecule for generation of DNA nanostructure
caccctcagagccaccaaatctccagcaacggacaacttt

SEQ ID NO: 2869 - DNA, 44 bp, Artificial sequence
  artificial DNA molecule for generation of DNA nanostructure
ttatcaccgtcaccgtttttcttgagccatttggaattattcat

SEQ ID NO: 2870 - DNA, 56 bp, Artificial sequence
  artificial DNA molecule for generation of DNA nanostructure
gaattagaagtagcgataaagccatagcagcaagtttcgtcacagacagtaaatga

SEQ ID NO: 2871 - DNA, 34 bp, Artificial sequence
  artificial DNA molecule for generation of DNA nanostructure
aatcaccagtagctcaacatggaacgaggcgcag

SEQ ID NO: 2872 - DNA, 40 bp, Artificial sequence
  artificial DNA molecule for generation of DNA nanostructure
atagcaagcccaatagaggaattggtgagaatagaaagga

SEQ ID NO: 2873 - DNA, 46 bp, Artificial sequence
  artificial DNA molecule for generation of DNA nanostructure
accgccaccctttttcagaaccgcacggtttttgtcagtgccttga

SEQ ID NO: 2874 - DNA, 32 bp, Artificial sequence
  artificial DNA molecule for generation of DNA nanostructure
atacatttgaggatttagaagtatgaaagcgt

SEQ ID NO: 2875 - DNA, 47 bp, Artificial sequence
  artificial DNA molecule for generation of DNA nanostructure
acaaacaattcgacaactcgtatctggccaaaattatttgcacgaag

SEQ ID NO: 2876 - DNA, 48 bp, Artificial sequence
  artificial DNA molecule for generation of DNA nanostructure
agcgcagtatcctcatcagaatcaagtttgcccgattgagggagggaa

SEQ ID NO: 2877 - DNA, 41 bp, Artificial sequence
  artificial DNA molecule for generation of DNA nanostructure
ataacggcaatttcatttccttgaacctccgaccgtgtgat

SEQ ID NO: 2878 - DNA, 47 bp, Artificial sequence
  artificial DNA molecule for generation of DNA nanostructure
acgttatacaactaagaacccatagacgttagccctcatcctttaat

SEQ ID NO: 2879 - DNA, 49 bp, Artificial sequence
  artificial DNA molecule for generation of DNA nanostructure
agcaatacatgtgagaagtacggggaaagccggcgaaacgattttttgt

SEQ ID NO: 2880 - DNA, 48 bp, Artificial sequence
  artificial DNA molecule for generation of DNA nanostructure
aattttttcacgttgaaccctcattttgctaaatgatacaaacgcctg

SEQ ID NO: 2881 - DNA, 32 bp, Artificial sequence
  artificial DNA molecule for generation of DNA nanostructure
tatgggattttcagggcaaactacggagtgta

SEQ ID NO: 2882 - DNA, 32 bp, Artificial sequence
  artificial DNA molecule for generation of DNA nanostructure
ataatggatttaacgtcagttctttgattagt

SEQ ID NO: 2883 - DNA, 42 bp, Artificial sequence
  artificial DNA molecule for generation of DNA nanostructure
tttttcaaaatttaagacgctaattttcaagaaatcatcggg

SEQ ID NO: 2884 - DNA, 40 bp, Artificial sequence
  artificial DNA molecule for generation of DNA nanostructure
cctgactattatagtcagcttcaatgaattaccaacagtt

SEQ ID NO: 2885 - DNA, 46 bp, Artificial sequence
  artificial DNA molecule for generation of DNA nanostructure
ggcttttgctacagaggctttttttgaggactaaagaccagcgaaa

SEQ ID NO: 2886 - DNA, 46 bp, Artificial sequence
  artificial DNA molecule for generation of DNA nanostructure
gtaacgatccagtcacacgaccgtaacactgagcggtcccaatgaa

SEQ ID NO: 2887 - DNA, 31 bp, Artificial sequence
  artificial DNA molecule for generation of DNA nanostructure
tctgacctaatatatttgcaaatccaatcgc

SEQ ID NO: 2888 - DNA, 41 bp, Artificial sequence
  artificial DNA molecule for generation of DNA nanostructure
gaaatacaaatgctttaaaagattaagaggcgcgagaaaac

SEQ ID NO: 2889 - DNA, 47 bp, Artificial sequence
  artificial DNA molecule for generation of DNA nanostructure
aaataaggcgttatatattaattgagaagagaacctaccacaaagaa

SEQ ID NO: 2890 - DNA, 44 bp, Artificial sequence
  artificial DNA molecule for generation of DNA nanostructure
gcggaatcgagaatgaccataaatcaatttttaatcaaagattc

SEQ ID NO: 2891 - DNA, 47 bp, Artificial sequence
  artificial DNA molecule for generation of DNA nanostructure
caatactttgataagagcgaaccattttctgtcagcggacgaataat

SEQ ID NO: 2892 - DNA, 32 bp, Artificial sequence
  artificial DNA molecule for generation of DNA nanostructure
acaccggaatcatagaagttttgctgaatccc

SEQ ID NO: 2893 - DNA, 30 bp, Artificial sequence
  artificial DNA molecule for generation of DNA nanostructure
cagagggagcttaattgctacaaggccgga

SEQ ID NO: 2894 - DNA, 37 bp, Artificial sequence
  artificial DNA molecule for generation of DNA nanostructure
gcttttgcttagaatataatgctgtagcacctgaatc

SEQ ID NO: 2895 - DNA, 40 bp, Artificial sequence
  artificial DNA molecule for generation of DNA nanostructure
acaaaattgaagccttacctcccgacttgcggctggaagt

SEQ ID NO: 2896 - DNA, 42 bp, Artificial sequence
  artificial DNA molecule for generation of DNA nanostructure
aaaataaaatgtttttttagactaggcatagtaagaccaggc

SEQ ID NO: 2897 - DNA, 32 bp, Artificial sequence
  artificial DNA molecule for generation of DNA nanostructure
atgcgccgctacagggaacgtgctggaggccg

SEQ ID NO: 2898 - DNA, 41 bp, Artificial sequence
  artificial DNA molecule for generation of DNA nanostructure
agggttagtcaatagtaatgctgattagttaagacgacaat

SEQ ID NO: 2899 - DNA, 43 bp, Artificial sequence
  artificial DNA molecule for generation of DNA nanostructure
aatcattgatcttgacaagtttttaccggatattcacttcatc

SEQ ID NO: 2900 - DNA, 40 bp, Artificial sequence
  artificial DNA molecule for generation of DNA nanostructure
acttctgaaagaatactgctggtaatatccagcagaatcc

SEQ ID NO: 2901 - DNA, 45 bp, Artificial sequence
  artificial DNA molecule for generation of DNA nanostructure
agttgataccattagatactccatgttatttttttagttgacgga

SEQ ID NO: 2902 - DNA, 47 bp, Artificial sequence
  artificial DNA molecule for generation of DNA nanostructure
tacggtgtattttatccattaccaggcgctagggcgctgcgcgctta

SEQ ID NO: 2903 - DNA, 52 bp, Artificial sequence
  artificial DNA molecule for generation of DNA nanostructure
gaacgagggtaaaaaaaaggctccaaaaggagtttttctttaattgtatcgg

SEQ ID NO: 2904 - DNA, 39 bp, Artificial sequence
  artificial DNA molecule for generation of DNA nanostructure
gagtaacattatcattaagacaaattagattaatggttt

SEQ ID NO: 2905 - DNA, 42 bp, Artificial sequence
  artificial DNA molecule for generation of DNA nanostructure
agatgatgaaacaaacataatggaaaaccttttatgcgtaga

SEQ ID NO: 2906 - DNA, 38 bp, Artificial sequence
  artificial DNA molecule for generation of DNA nanostructure
gcgatagcgaaaagcccgaaagacttcaaattaatttt

SEQ ID NO: 2907 - DNA, 45 bp, Artificial sequence
  artificial DNA molecule for generation of DNA nanostructure
tggcttagggtaatagccaaaatagcgagagttcattcactaaag

SEQ ID NO: 2908 - DNA, 39 bp, Artificial sequence
  artificial DNA molecule for generation of DNA nanostructure
aagagtaaggtcattgaatggaatagcattccaccagta

SEQ ID NO: 2909 - DNA, 38 bp, Artificial sequence
  artificial DNA molecule for generation of DNA nanostructure
ttataccagcttgagatggtttaatttttttcaacttt

SEQ ID NO: 2910 - DNA, 38 bp, Artificial sequence
  artificial DNA molecule for generation of DNA nanostructure
aacgattagagagtaagttagcaacgtcagagcgggag

SEQ ID NO: 2911 - DNA, 38 bp, Artificial sequence
  artificial DNA molecule for generation of DNA nanostructure
cttatgcgattttttttaagaactggctcaaccctcag

SEQ ID NO: 2912 - DNA, 39 bp, Artificial sequence
  artificial DNA molecule for generation of DNA nanostructure
ccaacaggtcagatattttgtcgaaaagtttttgcccga

SEQ ID NO: 2913 - DNA, 39 bp, Artificial sequence
  artificial DNA molecule for generation of DNA nanostructure
atcgcgttagcaaactcagaaaacgtcataaatattcat

SEQ ID NO: 2914 - DNA, 46 bp, Artificial sequence
  artificial DNA molecule for generation of DNA nanostructure
agaccggattaattcgagaagcaaagcggattgcatcaaaacagtt

SEQ ID NO: 2915 - DNA, 76 bp, Artificial sequence
  artificial DNA molecule for generation of DNA nanostructure
gcagtagagtaggtagagattaggcaccacaagattaagcaaatcagatagaggcgttttttttagcgaaaatcaa

SEQ ID NO: 2916 - DNA, 64 bp, Artificial sequence
  artificial DNA molecule for generation of DNA nanostructure
gcagtagagtaggtagagattaggcagataattattcatttttttcaataacataagtcagagg

SEQ ID NO: 2917 - DNA, 42 bp, Artificial sequence
  artificial DNA molecule for generation of DNA nanostructure
gccgtttagcagcagaacgtgcgatgctaacgtggagctatc

SEQ ID NO: 2918 - DNA, 50 bp, Artificial sequence
  artificial DNA molecule for generation of DNA nanostructure
gcagtagagtaggtagagattaggcattaccgaagcccttttaaatcggt

SEQ ID NO: 2919 - DNA, 65 bp, Artificial sequence
  artificial DNA molecule for generation of DNA nanostructure
gcagtagagtaggtagagattaggcatgttgttcgtattctatcttaccatcaggaatcattacc

SEQ ID NO: 2920 - DNA, 56 bp, Artificial sequence
  artificial DNA molecule for generation of DNA nanostructure
atcctatcagggcgatggcgggtaaagttaaaccggacttaacaagaggggttgag

SEQ ID NO: 2921 - DNA, 55 bp, Artificial sequence
  artificial DNA molecule for generation of DNA nanostructure
tactcatttggggcgcgacggagatttgtattgaccaacttagtttgtcccaatt

SEQ ID NO: 2922 - DNA, 70 bp, Artificial sequence
  artificial DNA molecule for generation of DNA nanostructure
gcagtagagtaggtagagattaggcataatatgttagcaaacgtagaatagtaggagttgcagcccttca

SEQ ID NO: 2923 - DNA, 63 bp, Artificial sequence
  artificial DNA molecule for generation of DNA nanostructure
gcagtagagtaggtagagattaggcaaataagtttattttgtctcagaaccgccaccctcaga

SEQ ID NO: 2924 - DNA, 65 bp, Artificial sequence
  artificial DNA molecule for generation of DNA nanostructure
gcagtagagtaggtagagattaggcactgcgaacccttataactcctcacaggtgccccagcagg

SEQ ID NO: 2925 - DNA, 40 bp, Artificial sequence
  artificial DNA molecule for generation of DNA nanostructure
cgagatatccactattattttcgtctcttttttcgcgcaa

SEQ ID NO: 2926 - DNA, 58 bp, Artificial sequence
  artificial DNA molecule for generation of DNA nanostructure
gcagtagagtaggtagagattaggcagctaacgaccgttttaaatatgcacatataac

SEQ ID NO: 2927 - DNA, 58 bp, Artificial sequence
  artificial DNA molecule for generation of DNA nanostructure
gcagtagagtaggtagagattaggcatcccaatccaaataagaacgtggcttacaaaa

SEQ ID NO: 2928 - DNA, 42 bp, Artificial sequence
  artificial DNA molecule for generation of DNA nanostructure
agaataacttttttcaagaaagctttgattgctatttattta

SEQ ID NO: 2929 - DNA, 31 bp, Artificial sequence
  artificial DNA molecule for generation of DNA nanostructure
gtaacagtcagtacatatcgtcgctttaaca

SEQ ID NO: 2930 - DNA, 43 bp, Artificial sequence
  artificial DNA molecule for generation of DNA nanostructure
ccacaagattaagcaaatcagatagaggcgttttttttagcga

SEQ ID NO: 2931 - DNA, 45 bp, Artificial sequence
  artificial DNA molecule for generation of DNA nanostructure
aaatcaagataattattcatttttttcaataacataagtcagagg

SEQ ID NO: 2932 - DNA, 35 bp, Artificial sequence
  artificial DNA molecule for generation of DNA nanostructure
gccgtttagcagcagaacgtgcgatgctaacgtgg

SEQ ID NO: 2933 - DNA, 31 bp, Artificial sequence
  artificial DNA molecule for generation of DNA nanostructure
agctatcttaccgaagcccttttaaatcggt

SEQ ID NO: 2934 - DNA, 47 bp, Artificial sequence
  artificial DNA molecule for generation of DNA nanostructure
gggttgagtgttgttcgtattctatcttaccatcaggaatcattacc

SEQ ID NO: 2935 - DNA, 48 bp, Artificial sequence
  artificial DNA molecule for generation of DNA nanostructure
atcctatcagggcgatggcgggtaaagttaaaccggacttaacaagag

SEQ ID NO: 2936 - DNA, 47 bp, Artificial sequence
  artificial DNA molecule for generation of DNA nanostructure
tactcatttggggcgcgacggagatttgtattgaccaacttagtttg

SEQ ID NO: 2937 - DNA, 40 bp, Artificial sequence
  artificial DNA molecule for generation of DNA nanostructure
atgttagcaaacgtagaatagtaggagttgcagcccttca

SEQ ID NO: 2938 - DNA, 42 bp, Artificial sequence
  artificial DNA molecule for generation of DNA nanostructure
gtaacagttaccgccaccctcagatttatcaggacagcatcg

SEQ ID NO: 2939 - DNA, 47 bp, Artificial sequence
  artificial DNA molecule for generation of DNA nanostructure
tcccaattctgcgaacccttataactcctcacaggtgccccagcagg

SEQ ID NO: 2940 - DNA, 44 bp, Artificial sequence
  artificial DNA molecule for generation of DNA nanostructure
cgagatatccactattattttcgtctcttttttcgcgcaataat

SEQ ID NO: 2941 - DNA, 32 bp, Artificial sequence
  artificial DNA molecule for generation of DNA nanostructure
gctaacgaccgttttaaatatgcacatataac

SEQ ID NO: 2942 - DNA, 55 bp, Artificial sequence
  artificial DNA molecule for generation of DNA nanostructure
caaataagaacgtggcttacaaaagtaacagtcagtacatatcgtcgctttaaca

SEQ ID NO: 2943 - DNA, 50 bp, Artificial sequence
  artificial DNA molecule for generation of DNA nanostructure
agaataacttttttcaagaaagctttgattgctatttatttatcccaatc

SEQ ID NO: 2944 - DNA, 35 bp, Artificial sequence
  artificial DNA molecule for generation of DNA nanostructure
ttgaaaggaattgaggaaggttattagccctaaaa

SEQ ID NO: 2945 - DNA, 49 bp, Artificial sequence
  artificial DNA molecule for generation of DNA nanostructure
gcgaaaaaccgtagataataagagcaagaaacaatgaatattttaaatg

SEQ ID NO: 2946 - DNA, 32 bp, Artificial sequence
  artificial DNA molecule for generation of DNA nanostructure
aaacaggaagattaactagcatgtcaatcata

SEQ ID NO: 2947 - DNA, 32 bp, Artificial sequence
  artificial DNA molecule for generation of DNA nanostructure
catcgccattagagtctgtccatctgccgtaa

SEQ ID NO: 2948 - DNA, 51 bp, Artificial sequence
  artificial DNA molecule for generation of DNA nanostructure
tgtaccccggtcagtcacgttcagaggtggagccggatgccggcaatccgc

SEQ ID NO: 2949 - DNA, 37 bp, Artificial sequence
  artificial DNA molecule for generation of DNA nanostructure
agcactaaatcggaaccctaaaaatagcagcctttac

SEQ ID NO: 2950 - DNA, 43 bp, Artificial sequence
  artificial DNA molecule for generation of DNA nanostructure
caatgcctgagtaatgtgtctttagtgatgaaccatggtgctg

SEQ ID NO: 2951 - DNA, 37 bp, Artificial sequence
  artificial DNA molecule for generation of DNA nanostructure
gattcaaatacttttgaaatatttaaattgtaaacgt

SEQ ID NO: 2952 - DNA, 45 bp, Artificial sequence
  artificial DNA molecule for generation of DNA nanostructure
taatattttgttacattttttgcgattaaacctcaccggaaacaa

SEQ ID NO: 2953 - DNA, 43 bp, Artificial sequence
  artificial DNA molecule for generation of DNA nanostructure
taaagggtgaggaatcgatcggttgtgaaaaagagtatgagcc

SEQ ID NO: 2954 - DNA, 45 bp, Artificial sequence
  artificial DNA molecule for generation of DNA nanostructure
gaacggtaaatcagctaaattcgcattaaattagaaaagccccaa

SEQ ID NO: 2955 - DNA, 36 bp, Artificial sequence
  artificial DNA molecule for generation of DNA nanostructure
atcgtaagtataagccgggagaagcctttatttcaa

SEQ ID NO: 2956 - DNA, 37 bp, Artificial sequence
  artificial DNA molecule for generation of DNA nanostructure
cgcaaggataaaaccctcataatagcaatactccaac

SEQ ID NO: 2957 - DNA, 41 bp, Artificial sequence
  artificial DNA molecule for generation of DNA nanostructure
aggcggcaggtaaaaaatagaaattttacattatgaccctg

SEQ ID NO: 2958 - DNA, 32 bp, Artificial sequence
  artificial DNA molecule for generation of DNA nanostructure
gccaccaccctcagagccgcctctgaaacatg

SEQ ID NO: 2959 - DNA, 43 bp, Artificial sequence
  artificial DNA molecule for generation of DNA nanostructure
caaggcaaagattaccagaaggaaaccgaggaaacaaagaaac

SEQ ID NO: 2960 - DNA, 37 bp, Artificial sequence
  artificial DNA molecule for generation of DNA nanostructure
aataagtttattttgtctcagaaccgccaccctcaga

SEQ ID NO: 2961 - DNA, 22 bp, Artificial sequence
  artificial DNA molecule for generation of DNA nanostructure
gtaacaacccgtagcatacagg

SEQ ID NO: 2962 - DNA, 51 bp, Artificial sequence
  artificial DNA molecule for generation of DNA nanostructure
aaagtattaagtgacaacagtcgctgaggcttgcactacgttaacgagaaa

SEQ ID NO: 2963 - DNA, 35 bp, Artificial sequence
  artificial DNA molecule for generation of DNA nanostructure
aaagcgccattcgccattcaggctaatgtgagcga

SEQ ID NO: 2964 - DNA, 37 bp, Artificial sequence
  artificial DNA molecule for generation of DNA nanostructure
aggattaggattacctattataccagaacaaacaaag

SEQ ID NO: 2965 - DNA, 40 bp, Artificial sequence
  artificial DNA molecule for generation of DNA nanostructure
aaatacgagcccggttcggaagcggggttaaatcaccgga

SEQ ID NO: 2966 - DNA, 43 bp, Artificial sequence
  artificial DNA molecule for generation of DNA nanostructure
accccgccacccacaatcaatggtcaataacctgtgagtagat

SEQ ID NO: 2967 - DNA, 45 bp, Artificial sequence
  artificial DNA molecule for generation of DNA nanostructure
ctgcctataataggtggggttgatataagtatactcctcaagaga

SEQ ID NO: 2968 - DNA, 45 bp, Artificial sequence
  artificial DNA molecule for generation of DNA nanostructure
agtgccgtcgagatatcaccgaacagcttcttttgcgggatcgtc

SEQ ID NO: 2969 - DNA, 37 bp, Artificial sequence
  artificial DNA molecule for generation of DNA nanostructure
agagccgccataatcattgctcagtaccaggcggata

SEQ ID NO: 2970 - DNA, 37 bp, Artificial sequence
  artificial DNA molecule for generation of DNA nanostructure
tttgccatcttttcgccagcaaatgccccaaagaata

SEQ ID NO: 2971 - DNA, 43 bp, Artificial sequence
  artificial DNA molecule for generation of DNA nanostructure
caccaccctcagagagagccaccaccggaaccccttattagcg

SEQ ID NO: 2972 - DNA, 23 bp, Artificial sequence
  artificial DNA molecule for generation of DNA nanostructure
gattttagaagggaaatggttgc

SEQ ID NO: 2973 - DNA, 36 bp, Artificial sequence
  artificial DNA molecule for generation of DNA nanostructure
ctaaacattcctcgttagaatcaacgctgcgcgtaa

SEQ ID NO: 2974 - DNA, 40 bp, Artificial sequence
  artificial DNA molecule for generation of DNA nanostructure
cagattcacatggaaaggattattgggacatttaaatcct

SEQ ID NO: 2975 - DNA, 47 bp, Artificial sequence
  artificial DNA molecule for generation of DNA nanostructure
ctcaatcgtctgaaattacctacacaacaggaattaaaggagaaaca

SEQ ID NO: 2976 - DNA, 40 bp, Artificial sequence
  artificial DNA molecule for generation of DNA nanostructure
tttgacgagcacgtatcgcgtactgaaagcgacagccata

SEQ ID NO: 2977 - DNA, 36 bp, Artificial sequence
  artificial DNA molecule for generation of DNA nanostructure
ttgcggaatatcaacagagatgccattgttttgacg

SEQ ID NO: 2978 - DNA, 37 bp, Artificial sequence
  artificial DNA molecule for generation of DNA nanostructure
ccaccacacccgcgcaagtgtccagagccttaccaac

SEQ ID NO: 2979 - DNA, 30 bp, Artificial sequence
  artificial DNA molecule for generation of DNA nanostructure
tctttccgtaccagtaataaaatacattgg

SEQ ID NO: 2980 - DNA, 40 bp, Artificial sequence
  artificial DNA molecule for generation of DNA nanostructure
ttgaaaggaattgaggaaggttattagccctaaaattttt

SEQ ID NO: 2981 - DNA, 54 bp, Artificial sequence
  artificial DNA molecule for generation of DNA nanostructure
gcgaaaaaccgtagataataagagcaagaaacaatgaatattttaaatgttttt

SEQ ID NO: 2982 - DNA, 42 bp, Artificial sequence
  artificial DNA molecule for generation of DNA nanostructure
tttttaaacaggaagattaactagcatgtcaatcatattttt

SEQ ID NO: 2983 - DNA, 42 bp, Artificial sequence
  artificial DNA molecule for generation of DNA nanostructure
tttttcatcgccattagagtctgtccatctgccgtaattttt

SEQ ID NO: 2984 - DNA, 56 bp, Artificial sequence
  artificial DNA molecule for generation of DNA nanostructure
ttttttgtaccccggtcagtcacgttcagaggtggagccggatgccggcaatccgc

SEQ ID NO: 2985 - DNA, 42 bp, Artificial sequence
  artificial DNA molecule for generation of DNA nanostructure
tttttagcactaaatcggaaccctaaaaatagcagcctttac

SEQ ID NO: 2986 - DNA, 48 bp, Artificial sequence
  artificial DNA molecule for generation of DNA nanostructure
tttttcaatgcctgagtaatgtgtctttagtgatgaaccatggtgctg

SEQ ID NO: 2987 - DNA, 50 bp, Artificial sequence
  artificial DNA molecule for generation of DNA nanostructure
gaacggtaaatcagctaaattcgcattaaattagaaaagccccaattttt

SEQ ID NO: 2988 - DNA, 50 bp, Artificial sequence
  artificial DNA molecule for generation of DNA nanostructure
ttttttaatattttgttacattttttgcgattaaacctcaccggaaacaa

SEQ ID NO: 2989 - DNA, 48 bp, Artificial sequence
  artificial DNA molecule for generation of DNA nanostructure
ttttttaaagggtgaggaatcgatcggttgtgaaaaagagtatgagcc

SEQ ID NO: 2990 - DNA, 41 bp, Artificial sequence
  artificial DNA molecule for generation of DNA nanostructure
atcgtaagtataagccgggagaagcctttatttcaattttt

SEQ ID NO: 2991 - DNA, 42 bp, Artificial sequence
  artificial DNA molecule for generation of DNA nanostructure
gattcaaatacttttgaaatatttaaattgtaaacgtttttt

SEQ ID NO: 2992 - DNA, 42 bp, Artificial sequence
  artificial DNA molecule for generation of DNA nanostructure
tttttcgcaaggataaaaccctcataatagcaatactccaac

SEQ ID NO: 2993 - DNA, 46 bp, Artificial sequence
  artificial DNA molecule for generation of DNA nanostructure
aggcggcaggtaaaaaatagaaattttacattatgaccctgttttt

SEQ ID NO: 2994 - DNA, 42 bp, Artificial sequence
  artificial DNA molecule for generation of DNA nanostructure
tttttgccaccaccctcagagccgcctctgaaacatgttttt

SEQ ID NO: 2995 - DNA, 48 bp, Artificial sequence
  artificial DNA molecule for generation of DNA nanostructure
tttttcaaggcaaagattaccagaaggaaaccgaggaaacaaagaaac

SEQ ID NO: 2996 - DNA, 42 bp, Artificial sequence
  artificial DNA molecule for generation of DNA nanostructure
aataagtttattttgtctcagaaccgccaccctcagattttt

SEQ ID NO: 2997 - DNA, 32 bp, Artificial sequence
  artificial DNA molecule for generation of DNA nanostructure
tttttgtaacaacccgtagcatacaggttttt

SEQ ID NO: 2998 - DNA, 56 bp, Artificial sequence
  artificial DNA molecule for generation of DNA nanostructure
tttttaaagtattaagtgacaacagtcgctgaggcttgcactacgttaacgagaaa

SEQ ID NO: 2999 - DNA, 40 bp, Artificial sequence
  artificial DNA molecule for generation of DNA nanostructure
aaagcgccattcgccattcaggctaatgtgagcgattttt

SEQ ID NO: 3000 - DNA, 42 bp, Artificial sequence
  artificial DNA molecule for generation of DNA nanostructure
agagccgccataatcattgctcagtaccaggcggatattttt

SEQ ID NO: 3001 - DNA, 42 bp, Artificial sequence
  artificial DNA molecule for generation of DNA nanostructure
ttttttttgccatcttttcgccagcaaatgccccaaagaata

SEQ ID NO: 3002 - DNA, 42 bp, Artificial sequence
  artificial DNA molecule for generation of DNA nanostructure
tttttaggattaggattacctattataccagaacaaacaaag

SEQ ID NO: 3003 - DNA, 45 bp, Artificial sequence
  artificial DNA molecule for generation of DNA nanostructure
aaatacgagcccggttcggaagcggggttaaatcaccggattttt

SEQ ID NO: 3004 - DNA, 48 bp, Artificial sequence
  artificial DNA molecule for generation of DNA nanostructure
tttttaccccgccacccacaatcaatggtcaataacctgtgagtagat

SEQ ID NO: 3005 - DNA, 50 bp, Artificial sequence
  artificial DNA molecule for generation of DNA nanostructure
ctgcctataataggtggggttgatataagtatactcctcaagagattttt

SEQ ID NO: 3006 - DNA, 50 bp, Artificial sequence
  artificial DNA molecule for generation of DNA nanostructure
tttttagtgccgtcgagatatcaccgaacagcttcttttgcgggatcgtc

SEQ ID NO: 3007 - DNA, 48 bp, Artificial sequence
  artificial DNA molecule for generation of DNA nanostructure
caccaccctcagagagagccaccaccggaaccccttattagcgttttt

SEQ ID NO: 3008 - DNA, 28 bp, Artificial sequence
  artificial DNA molecule for generation of DNA nanostructure
gattttagaagggaaatggttgcttttt

SEQ ID NO: 3009 - DNA, 41 bp, Artificial sequence
  artificial DNA molecule for generation of DNA nanostructure
ctaaacattcctcgttagaatcaacgctgcgcgtaattttt

SEQ ID NO: 3010 - DNA, 45 bp, Artificial sequence
  artificial DNA molecule for generation of DNA nanostructure
tttttcagattcacatggaaaggattattgggacatttaaatcct

SEQ ID NO: 3011 - DNA, 52 bp, Artificial sequence
  artificial DNA molecule for generation of DNA nanostructure
tttttctcaatcgtctgaaattacctacacaacaggaattaaaggagaaaca

SEQ ID NO: 3012 - DNA, 45 bp, Artificial sequence
  artificial DNA molecule for generation of DNA nanostructure
ttttttttgacgagcacgtatcgcgtactgaaagcgacagccata

SEQ ID NO: 3013 - DNA, 41 bp, Artificial sequence
  artificial DNA molecule for generation of DNA nanostructure
ttgcggaatatcaacagagatgccattgttttgacgttttt

SEQ ID NO: 3014 - DNA, 42 bp, Artificial sequence
  artificial DNA molecule for generation of DNA nanostructure
tttttccaccacacccgcgcaagtgtccagagccttaccaac

SEQ ID NO: 3015 - DNA, 35 bp, Artificial sequence
  artificial DNA molecule for generation of DNA nanostructure
tctttccgtaccagtaataaaatacattggttttt

SEQ ID NO: 3016 - DNA, 20 bp, Artificial sequence
  artificial DNA molecule for generation of DNA nanostructure
gattttagaagggaaatggt

SEQ ID NO: 3017 - DNA, 33 bp, Artificial sequence
  artificial DNA molecule for generation of DNA nanostructure
ctaaacattcctcgttagaatcaacgctgcgcg

SEQ ID NO: 3018 - DNA, 37 bp, Artificial sequence
  artificial DNA molecule for generation of DNA nanostructure
attcacatggaaaggattattgggacatttaaatcct

SEQ ID NO: 3019 - DNA, 47 bp, Artificial sequence; identical to SEQ ID NO: 2975
  artificial DNA molecule for generation of DNA nanostructure

SEQ ID NO: 3020 - DNA, 37 bp, Artificial sequence
  artificial DNA molecule for generation of DNA nanostructure
gacgagcacgtatcgcgtactgaaagcgacagccata

SEQ ID NO: 3021 - DNA, 33 bp, Artificial sequence
  artificial DNA molecule for generation of DNA nanostructure
ttgcggaatatcaacagagatgccattgttttg

SEQ ID NO: 3022 - DNA, 34 bp, Artificial sequence
  artificial DNA molecule for generation of DNA nanostructure
ccacacccgcgcaagtgtccagagccttaccaac

SEQ ID NO: 3023 - DNA, 30 bp, Artificial sequence; identical to SEQ ID NO: 2979
  artificial DNA molecule for generation of DNA nanostructure

SEQ ID NO: 3024 - DNA, 47 bp, Artificial sequence
  artificial DNA molecule for generation of DNA nanostructure
aatcatagacttgcgtggggtcgtcaatatctggtcagtggagcact

SEQ ID NO: 3025 - DNA, 31 bp, Artificial sequence
  artificial DNA molecule for generation of DNA nanostructure
ctattttcagctatcagggcgattaacgatt

SEQ ID NO: 3026 - DNA, 46 bp, Artificial sequence
  artificial DNA molecule for generation of DNA nanostructure
caatatcatgaatatacagttttttacagtaccttttaaaagaaat

SEQ ID NO: 3027 - DNA, 52 bp, Artificial sequence
  artificial DNA molecule for generation of DNA nanostructure
atgatgaatatcttaccgaagccttttttttttaagaaaagtaacaatgaaa

SEQ ID NO: 3028 - DNA, 41 bp, Artificial sequence
  artificial DNA molecule for generation of DNA nanostructure
acaatcaataaacgcggtccgttaaggattgccggagctga

SEQ ID NO: 3029 - DNA, 30 bp, Artificial sequence
  artificial DNA molecule for generation of DNA nanostructure
cagacgataaatcaagattgcgctacgtga

SEQ ID NO: 3030 - DNA, 45 bp, Artificial sequence
  artificial DNA molecule for generation of DNA nanostructure
cgagccagtaattttttagagaacaacatgttttttcagcttaac

SEQ ID NO: 3031 - DNA, 40 bp, Artificial sequence; identical to SEQ ID NO: 2766
  artificial DNA molecule for generation of DNA nanostructure

SEQ ID NO: 3032 - DNA, 47 bp, Artificial sequence
  artificial DNA molecule for generation of DNA nanostructure
tgaaaggagcaaatatttaaagagccagcagggaaccctcccaaatc

SEQ ID NO: 3033 - DNA, 48 bp, Artificial sequence
  artificial DNA molecule for generation of DNA nanostructure
cagcgggggtctggtcgccagaatgcggcgtaattctgtctgaacaag

SEQ ID NO: 3034 - DNA, 42 bp, Artificial sequence
  artificial DNA molecule for generation of DNA nanostructure
tgctgcgagcagcagaacgtgcgatgctaacgtggttacgca

SEQ ID NO: 3035 - DNA, 32 bp, Artificial sequence
  artificial DNA molecule for generation of DNA nanostructure
tctcacggtacatcgacatagattcaaaaggg

SEQ ID NO: 3036 - DNA, 40 bp, Artificial sequence
  artificial DNA molecule for generation of DNA nanostructure
gggatagcggaacaaacatatgtaccccggttgggagaag

SEQ ID NO: 3037 - DNA, 38 bp, Artificial sequence
  artificial DNA molecule for generation of DNA nanostructure
aataaggccaaatatattttagttattttttttcatct

SEQ ID NO: 3038 - DNA, 39 bp, Artificial sequence
  artificial DNA molecule for generation of DNA nanostructure
ttccggcagtaaaaaaaatgccaattacggcttcgaatt

SEQ ID NO: 3039 - DNA, 45 bp, Artificial sequence
  artificial DNA molecule for generation of DNA nanostructure
cgacaataaatataaagtaccgatttccagtcttaccaacgctaa

SEQ ID NO: 3040 - DNA, 39 bp, Artificial sequence
  artificial DNA molecule for generation of DNA nanostructure
cgcgcctaacctcccaatagcaaaacaactagaggattt

SEQ ID NO: 3041 - DNA, 38 bp, Artificial sequence
  artificial DNA molecule for generation of DNA nanostructure
tggtttgaaatatttttcgaccgtgtgataacagaaat

SEQ ID NO: 3042 - DNA, 44 bp, Artificial sequence
  artificial DNA molecule for generation of DNA nanostructure
gagccgtcaatatcaaaccctcaaaggaagaactcaaactatcg

SEQ ID NO: 3043 - DNA, 40 bp, Artificial sequence
  artificial DNA molecule for generation of DNA nanostructure
atagattatcagtattagcatcaccttgctgacttgcctg

SEQ ID NO: 3044 - DNA, 56 bp, Artificial sequence
  artificial DNA molecule for generation of DNA nanostructure
gagagatatttttcccacaaagaaagcgaaatttttgagcgggcgctatagcaata

SEQ ID NO: 3045 - DNA, 39 bp, Artificial sequence
  artificial DNA molecule for generation of DNA nanostructure
tcattgcaaaaagtgtcactgcgcgcctgtgcactcagc

SEQ ID NO: 3046 - DNA, 42 bp, Artificial sequence; identical to SEQ ID NO: 2771
  artificial DNA molecule for generation of DNA nanostructure

SEQ ID NO: 3047 - DNA, 52 bp, Artificial sequence
  artificial DNA molecule for generation of DNA nanostructure
ttttagcggtttatcacatgtagaaaccaatcaattttttatcgcaaattct

SEQ ID NO: 3048 - DNA, 48 bp, Artificial sequence
  artificial DNA molecule for generation of DNA nanostructure
gacgatccagcgcaataatatcccctcatcgagaacataacggcatca

SEQ ID NO: 3049 - DNA, 38 bp, Artificial sequence
  artificial DNA molecule for generation of DNA nanostructure
gtgcccccggttacctttacactggtgtgttccacggg

SEQ ID NO: 3050 - DNA, 48 bp, Artificial sequence
  artificial DNA molecule for generation of DNA nanostructure
aataataaaataataaaaagccggagccgaacaagtttttggaggttt

SEQ ID NO: 3051 - DNA, 38 bp, Artificial sequence
  artificial DNA molecule for generation of DNA nanostructure
ttcgcactcgtagcaagccgtttttattttcggccagt

SEQ ID NO: 3052 - DNA, 40 bp, Artificial sequence
  artificial DNA molecule for generation of DNA nanostructure
cttatcattccaagaaccgcgcccaaatttaaatacattt

SEQ ID NO: 3053 - DNA, 35 bp, Artificial sequence
  artificial DNA molecule for generation of DNA nanostructure
gatgccgtgcatcacgggcgcccagcatccgccag

SEQ ID NO: 3054 - DNA, 34 bp, Artificial sequence
  artificial DNA molecule for generation of DNA nanostructure
aaagttacgcacccagctacatgcttctgtaaat

SEQ ID NO: 3055 - DNA, 41 bp, Artificial sequence
  artificial DNA molecule for generation of DNA nanostructure
aggcttatccgggctgaaggttagccaagctacgttgtaaa

SEQ ID NO: 3056 - DNA, 39 bp, Artificial sequence
  artificial DNA molecule for generation of DNA nanostructure
tagctatattttcattagaaaatacatacataaaggtgg

SEQ ID NO: 3057 - DNA, 48 bp, Artificial sequence
  artificial DNA molecule for generation of DNA nanostructure
ctactaatggcgggtaaagttaaaccggacttaacaagaggggttgag

SEQ ID NO: 3058 - DNA, 46 bp, Artificial sequence
  artificial DNA molecule for generation of DNA nanostructure
gcaaatcaaatcattacgggtattaaaccaagtaccgcaatcctaa

SEQ ID NO: 3059 - DNA, 40 bp, Artificial sequence
  artificial DNA molecule for generation of DNA nanostructure
cgaacgtgcgtaaagcactaaatccaaatgaaaaatctaa

SEQ ID NO: 3060 - DNA, 44 bp, Artificial sequence
  artificial DNA molecule for generation of DNA nanostructure
cttctttgtttttttagtaataacatcaaccttaccgccagcca

SEQ ID NO: 3061 - DNA, 32 bp, Artificial sequence
  artificial DNA molecule for generation of DNA nanostructure
ctcgtattaaatcctttgcccgaatgaggcgg

SEQ ID NO: 3062 - DNA, 52 bp, Artificial sequence
  artificial DNA molecule for generation of DNA nanostructure
ttcaggtttaattttaaaagtttgagtaacattttttatcattttgcggaac

SEQ ID NO: 3063 - DNA, 53 bp, Artificial sequence
  artificial DNA molecule for generation of DNA nanostructure
acgacacaaacaagtgccacgtatctttatggcaaatgcgaggcgtgaagcct

SEQ ID NO: 3064 - DNA, 40 bp, Artificial sequence
  artificial DNA molecule for generation of DNA nanostructure
gtcaaaggcagtttgggtagaacgaaagggccgttttcac

SEQ ID NO: 3065 - DNA, 38 bp, Artificial sequence
  artificial DNA molecule for generation of DNA nanostructure
gcgaaaaaccgtaagccaaaagaactggcatgattaag

SEQ ID NO: 3066 - DNA, 48 bp, Artificial sequence
  artificial DNA molecule for generation of DNA nanostructure
cctgtaatacttttgcgataatcacggttgtgaaaaagagtatgagcc

SEQ ID NO: 3067 - DNA, 32 bp, Artificial sequence
  artificial DNA molecule for generation of DNA nanostructure
caaaaacactttagtgatgaaccatggtgctg

SEQ ID NO: 3068 - DNA, 47 bp, Artificial sequence
  artificial DNA molecule for generation of DNA nanostructure
aaagggagccccatccatacagggtctggccttcctgtattttttaa

SEQ ID NO: 3069 - DNA, 40 bp, Artificial sequence
  artificial DNA molecule for generation of DNA nanostructure
agtagtgcgcgagaaaggaagggagaattgagttaagccc

SEQ ID NO: 3070 - DNA, 42 bp, Artificial sequence
  artificial DNA molecule for generation of DNA nanostructure
atgtcaatcggcggattgaccgtacgccagctcgccatgttt

SEQ ID NO: 3071 - DNA, 39 bp, Artificial sequence
  artificial DNA molecule for generation of DNA nanostructure
atcgtagggatatagatttacgagacaatagataagtcc

SEQ ID NO: 3072 - DNA, 29 bp, Artificial sequence
  artificial DNA molecule for generation of DNA nanostructure
ggctattctaagaaccaacagtaccatca

SEQ ID NO: 3073 - DNA, 46 bp, Artificial sequence
  artificial DNA molecule for generation of DNA nanostructure
aggcggcttatgacaaaggtggcatcaattactccttaactccaac

SEQ ID NO: 3074 - DNA, 43 bp, Artificial sequence
  artificial DNA molecule for generation of DNA nanostructure
tctgacctggtctgagagattttttacctttttaacttatcaa

SEQ ID NO: 3075 - DNA, 40 bp, Artificial sequence
  artificial DNA molecule for generation of DNA nanostructure
aacaccgcctgcaacattcgacaaagaagtattagacttt

SEQ ID NO: 3076 - DNA, 39 bp, Artificial sequence
  artificial DNA molecule for generation of DNA nanostructure
acgccagggttttccgttaaaatatcaaacttaaatgag

SEQ ID NO: 3077 - DNA, 48 bp, Artificial sequence
  artificial DNA molecule for generation of DNA nanostructure
gaaaagccaaacaacccgtcggatgcgattaaacctcaccggaaacaa

SEQ ID NO: 3078 - DNA, 46 bp, Artificial sequence
  artificial DNA molecule for generation of DNA nanostructure
taccgaacgatttttccaccagcattgctttttacaggaaaaacgc

SEQ ID NO: 3079 - DNA, 48 bp, Artificial sequence
  artificial DNA molecule for generation of DNA nanostructure
aatattttcagtcacgttcagaggtggagccgcagcaaatcaatccgc

SEQ ID NO: 3080 - DNA, 40 bp, Artificial sequence
  artificial DNA molecule for generation of DNA nanostructure
gaagataaaacagaggcgttattaacgtcagaaatagata

SEQ ID NO: 3081 - DNA, 32 bp, Artificial sequence
  artificial DNA molecule for generation of DNA nanostructure
ggcgaaagggggatgtgctgcaagtctccgtg

SEQ ID NO: 3082 - DNA, 43 bp, Artificial sequence
  artificial DNA molecule for generation of DNA nanostructure
caacatattcgcaaatggtttttcaataacctgtttcaacgca

SEQ ID NO: 3083 - DNA, 52 bp, Artificial sequence; identical to SEQ ID NO: 2849
  artificial DNA molecule for generation of DNA nanostructure

SEQ ID NO: 3084 - DNA, 46 bp, Artificial sequence
  artificial DNA molecule for generation of DNA nanostructure
atgggataggtttttcacgttggtggtattttttcgtaaaactagc

SEQ ID NO: 3085 - DNA, 40 bp, Artificial sequence
  artificial DNA molecule for generation of DNA nanostructure
gtagatgggcgcatcggcgcaactgaatttgtggaagatc

SEQ ID NO: 3086 - DNA, 49 bp, Artificial sequence
  artificial DNA molecule for generation of DNA nanostructure
aaagcgccattcgccattcaggcttaaccgtgcggcctcagccggagac

SEQ ID NO: 3087 - DNA, 39 bp, Artificial sequence
  artificial DNA molecule for generation of DNA nanostructure
tccaaaagtgccggaaaccaggctccggcaccgcttctg

SEQ ID NO: 3088 - DNA, 40 bp, Artificial sequence
  artificial DNA molecule for generation of DNA nanostructure
tctccaaaatcggtttatcagcttaaattgggcataggct

SEQ ID NO: 3089 - DNA, 32 bp, Artificial sequence
  artificial DNA molecule for generation of DNA nanostructure
gaatagaaaggaacaactaaaggactcctcaa

SEQ ID NO: 3090 - DNA, 52 bp, Artificial sequence
  artificial DNA molecule for generation of DNA nanostructure
aaaatcccgaaaattcatatggtttttttaccagcgccaaagttattttgtc

SEQ ID NO: 3091 - DNA, 42 bp, Artificial sequence
  artificial DNA molecule for generation of DNA nanostructure
aacagttgcaaccgatcgaaaatcctgttcagcctccggcca

SEQ ID NO: 3092 - DNA, 38 bp, Artificial sequence
  artificial DNA molecule for generation of DNA nanostructure
ttaatgaatcacattaattgcgttgcgctcatccacac

SEQ ID NO: 3093 - DNA, 47 bp, Artificial sequence
  artificial DNA molecule for generation of DNA nanostructure
tatcagtcaggaaaatctacgttaataaacagaccaactcttcatca

SEQ ID NO: 3094 - DNA, 42 bp, Artificial sequence
  artificial DNA molecule for generation of DNA nanostructure
tataccaagcgcgaaacaacctgctcaagtttccagcaacgg

SEQ ID NO: 3095 - DNA, 44 bp, Artificial sequence
  artificial DNA molecule for generation of DNA nanostructure
atggtcatagccggaagcataaagtgttttttaagccggtgccg

SEQ ID NO: 3096 - DNA, 42 bp, Artificial sequence
  artificial DNA molecule for generation of DNA nanostructure
ttcggaacttaggattagcggggtcggagtgagacaatgaca

SEQ ID NO: 3097 - DNA, 44 bp, Artificial sequence
  artificial DNA molecule for generation of DNA nanostructure
aggataaatttttatttttagaaccctcaagagaatcgatgaac

SEQ ID NO: 3098 - DNA, 44 bp, Artificial sequence
  artificial DNA molecule for generation of DNA nanostructure
aattgctgttgtatcatcgacaggtagaaagattcatcagttga

SEQ ID NO: 3099 - DNA, 30 bp, Artificial sequence
  artificial DNA molecule for generation of DNA nanostructure
gcaaaatcacgggtaaatattgagtcaccg

SEQ ID NO: 3100 - DNA, 39 bp, Artificial sequence
  artificial DNA molecule for generation of DNA nanostructure
cgtaatcccgcctgggtattggggggacgacgccagctt

SEQ ID NO: 3101 - DNA, 46 bp, Artificial sequence
  artificial DNA molecule for generation of DNA nanostructure
tcgtcatagggtcactgttgccctgtttttggctgaggcggtttgc

SEQ ID NO: 3102 - DNA, 46 bp, Artificial sequence
  artificial DNA molecule for generation of DNA nanostructure
aacatcccgcagccagctggggtgcttttttaatgagtgagctaac

SEQ ID NO: 3103 - DNA, 33 bp, Artificial sequence
  artificial DNA molecule for generation of DNA nanostructure
gtttaatttcaataagaacggctgacttgaaag

SEQ ID NO: 3104 - DNA, 47 bp, Artificial sequence
  artificial DNA molecule for generation of DNA nanostructure
ccaccaccacgaaagatcatgaggcatgttacaccgaactctatcat

SEQ ID NO: 3105 - DNA, 39 bp, Artificial sequence
  artificial DNA molecule for generation of DNA nanostructure
agagccgccaccagaaattaccattagcaaggccggaaa

SEQ ID NO: 3106 - DNA, 48 bp, Artificial sequence
  artificial DNA molecule for generation of DNA nanostructure
ttgcaggggagaaggactattattctgaaacaattcacaaagactttt

SEQ ID NO: 3107 - DNA, 32 bp, Artificial sequence
  artificial DNA molecule for generation of DNA nanostructure
agttaaaggctttgaggacgtaataagtttta

SEQ ID NO: 3108 - DNA, 50 bp, Artificial sequence
  artificial DNA molecule for generation of DNA nanostructure
tgcgatttctttaatcaccagaacgagtagtgctttcgcgtcaccctcag

SEQ ID NO: 3109 - DNA, 43 bp, Artificial sequence
  artificial DNA molecule for generation of DNA nanostructure
tggctcattatacccgctcacaatctgcccgctttccgagatg

SEQ ID NO: 3110 - DNA, 37 bp, Artificial sequence
  artificial DNA molecule for generation of DNA nanostructure
cagttgagctgccagcacgcgtgatcaaaagaaatcg

SEQ ID NO: 3111 - DNA, 49 bp, Artificial sequence
  artificial DNA molecule for generation of DNA nanostructure
attatcacccggaaattattcattatggtgatggtggttccgaatagcc

SEQ ID NO: 3112 - DNA, 39 bp, Artificial sequence
  artificial DNA molecule for generation of DNA nanostructure
cttttcaccagtcagccggagagttaattgtaaaaaggc

SEQ ID NO: 3113 - DNA, 39 bp, Artificial sequence
  artificial DNA molecule for generation of DNA nanostructure
tgcgggataggtgaattaataattttttcacgttgaaaa

SEQ ID NO: 3114 - DNA, 49 bp, Artificial sequence
  artificial DNA molecule for generation of DNA nanostructure
cagcgaaaatgaccaggcgcttagtcgggaaacctgtcgtgcggagcct

SEQ ID NO: 3115 - DNA, 44 bp, Artificial sequence
  artificial DNA molecule for generation of DNA nanostructure
aagtacaaggcacctgttttaccagcaaaatcaccagtagcacc

SEQ ID NO: 3116 - DNA, 45 bp, Artificial sequence
  artificial DNA molecule for generation of DNA nanostructure
ggtcataccgggtttttgtttgatccccggttttttaccgtgtgg

SEQ ID NO: 3117 - DNA, 40 bp, Artificial sequence
  artificial DNA molecule for generation of DNA nanostructure
cgagatatccactattattttcgtctcttttttcgcgaat

SEQ ID NO: 3118 - DNA, 34 bp, Artificial sequence
  artificial DNA molecule for generation of DNA nanostructure
atcaagtttgggcaaaagaatacacaaacctaaa

SEQ ID NO: 3119 - DNA, 39 bp, Artificial sequence
  artificial DNA molecule for generation of DNA nanostructure
ggtagctatttttgaattcaaccagctgattgcaagcgg

SEQ ID NO: 3120 - DNA, 49 bp, Artificial sequence
  artificial DNA molecule for generation of DNA nanostructure
ctacagaggccgctttagagtaatcgagaaacattgtgaaagactggat

SEQ ID NO: 3121 - DNA, 54 bp, Artificial sequence
  artificial DNA molecule for generation of DNA nanostructure
gtggtgccatctttttcacgcaaccagccggcagtttttaccgtcgccctgaga

SEQ ID NO: 3122 - DNA, 43 bp, Artificial sequence
  artificial DNA molecule for generation of DNA nanostructure
gtgagcgaaattgtgtagagacgggcaacgttctagtccatat

SEQ ID NO: 3123 - DNA, 46 bp, Artificial sequence
  artificial DNA molecule for generation of DNA nanostructure
ctcctcatccacgctggttcctagtttcatctgataaattagacag

SEQ ID NO: 3124 - DNA, 46 bp, Artificial sequence
  artificial DNA molecule for generation of DNA nanostructure
tgagaaaggagagatagactttttttctccgtggtgaaacgtacag

SEQ ID NO: 3125 - DNA, 55 bp, Artificial sequence
  artificial DNA molecule for generation of DNA nanostructure
tgagggagggaagtgtctaatgccactacgaacggagataatataatggatggct

SEQ ID NO: 3126 - DNA, 40 bp, Artificial sequence
  artificial DNA molecule for generation of DNA nanostructure
tcggccaacgcgcggggcactccagacagtatcatctgcc

SEQ ID NO: 3127 - DNA, 38 bp, Artificial sequence
  artificial DNA molecule for generation of DNA nanostructure
gaggtaatgggttttttaaggtttctttgctcggcgaa

SEQ ID NO: 3128 - DNA, 39 bp, Artificial sequence
  artificial DNA molecule for generation of DNA nanostructure
cagctgcatggtttttaacatacgagctgtttcctgtgt

SEQ ID NO: 3129 - DNA, 42 bp, Artificial sequence
  artificial DNA molecule for generation of DNA nanostructure
catcggaaaggacagagtgtcgaagaacaacattattcgtcc

SEQ ID NO: 3130 - DNA, 51 bp, Artificial sequence
  artificial DNA molecule for generation of DNA nanostructure
agtcaaaacggcaatgcctgagtaatttttttgtaggtaaaaacctttatt

SEQ ID NO: 3131 - DNA, 40 bp, Artificial sequence
  artificial DNA molecule for generation of DNA nanostructure
gcccggaataggtgtaaagttttgcctcatagttagcgta

SEQ ID NO: 3132 - DNA, 38 bp, Artificial sequence
  artificial DNA molecule for generation of DNA nanostructure
aaatccaatacctttaaacagttcagaaaacgattata

SEQ ID NO: 3133 - DNA, 44 bp, Artificial sequence
  artificial DNA molecule for generation of DNA nanostructure
gtttaccaagagggggtaatagtaaaatttttgtttttacctta

SEQ ID NO: 3134 - DNA, 41 bp, Artificial sequence
  artificial DNA molecule for generation of DNA nanostructure
aacggattaactttttgttaaatagcgttatagctgtcttt

SEQ ID NO: 3135 - DNA, 47 bp, Artificial sequence
  artificial DNA molecule for generation of DNA nanostructure
acctttaaaatgaaaacgtttgcctaatgcgccgctacactttcctc

SEQ ID NO: 3136 - DNA, 32 bp, Artificial sequence
  artificial DNA molecule for generation of DNA nanostructure
gaaacaatctgagcaaaaggtaatatccagaa

SEQ ID NO: 3137 - DNA, 45 bp, Artificial sequence
  artificial DNA molecule for generation of DNA nanostructure
tttttgcgctgtagctcaactaaaacactttttcatcgtaatcag

SEQ ID NO: 3138 - DNA, 39 bp, Artificial sequence
  artificial DNA molecule for generation of DNA nanostructure
gaacgaggacttcaacgtcatacccgccaccccctcaga

SEQ ID NO: 3139 - DNA, 42 bp, Artificial sequence
  artificial DNA molecule for generation of DNA nanostructure
atttggcatagtatttttgagcaaacgaactaacgatccgcg

SEQ ID NO: 3140 - DNA, 38 bp, Artificial sequence
  artificial DNA molecule for generation of DNA nanostructure
tgacggattgcatcatcattttaaaatcactgagaagt

SEQ ID NO: 3141 - DNA, 30 bp, Artificial sequence
  artificial DNA molecule for generation of DNA nanostructure
caaaaggcgagcttcaaagcgatcataatc

SEQ ID NO: 3142 - DNA, 32 bp, Artificial sequence
  artificial DNA molecule for generation of DNA nanostructure
gttagaatcagagcggagacaggataatcagt

SEQ ID NO: 3143 - DNA, 32 bp, Artificial sequence
  artificial DNA molecule for generation of DNA nanostructure
acatgtaatttagatacataacgccaaaatag

SEQ ID NO: 3144 - DNA, 40 bp, Artificial sequence
  artificial DNA molecule for generation of DNA nanostructure
agaatcctttatcccattacaaaataaacagcttgctcct

SEQ ID NO: 3145 - DNA, 45 bp, Artificial sequence
  artificial DNA molecule for generation of DNA nanostructure
ttttaattaattacgaaggaataccacattctttgataagagagt

SEQ ID NO: 3146 - DNA, 42 bp, Artificial sequence
  artificial DNA molecule for generation of DNA nanostructure
cgtcgctattaattaattagagtcaacaagaaaatattcatt

SEQ ID NO: 3147 - DNA, 39 bp, Artificial sequence
  artificial DNA molecule for generation of DNA nanostructure
tcagaagcaaagtgcccaataggcttctgaaaatcctga

SEQ ID NO: 3148 - DNA, 46 bp, Artificial sequence
  artificial DNA molecule for generation of DNA nanostructure
accctgacccataaataatcgtcataaatattcattgaaaaaagaa

SEQ ID NO: 3149 - DNA, 43 bp, Artificial sequence
  artificial DNA molecule for generation of DNA nanostructure
ccaaatcagcgcagacggttttttaatcataagggattagccg

SEQ ID NO: 3150 - DNA, 47 bp, Artificial sequence
  artificial DNA molecule for generation of DNA nanostructure
gaatcgccatattaataggttggcgcgagaacgcctgatatatcaaa

SEQ ID NO: 3151 - DNA, 41 bp, Artificial sequence
  artificial DNA molecule for generation of DNA nanostructure
aacagtgaggcttttgctccccctcaaatgtagaaaaagcc

SEQ ID NO: 3152 - DNA, 31 bp, Artificial sequence
  artificial DNA molecule for generation of DNA nanostructure
taccagtatatcatatagaataaacaccgga

SEQ ID NO: 3153 - DNA, 40 bp, Artificial sequence
  artificial DNA molecule for generation of DNA nanostructure
gcgtccaatactgcggcaaaaatcacgtaacagcattcca

SEQ ID NO: 3154 - DNA, 28 bp, Artificial sequence
  artificial DNA molecule for generation of DNA nanostructure
tgtttagtaaagcccaaagaagttatat

SEQ ID NO: 3155 - DNA, 42 bp, Artificial sequence
  artificial DNA molecule for generation of DNA nanostructure
aacgccagctgagattcccttttaccttacgatttctgaaca

SEQ ID NO: 3156 - DNA, 31 bp, Artificial sequence
  artificial DNA molecule for generation of DNA nanostructure
acaaacattagtgaatctccggcttgcagaa

SEQ ID NO: 3157 - DNA, 48 bp, Artificial sequence
  artificial DNA molecule for generation of DNA nanostructure
atggctttttaccgttcgccaccctcagaaccaatgaaaccatcgata

SEQ ID NO: 3158 - DNA, 41 bp, Artificial sequence
  artificial DNA molecule for generation of DNA nanostructure
tttaacttttagcttaggtaaatgccgaagggcttaattga

SEQ ID NO: 3159 - DNA, 46 bp, Artificial sequence
  artificial DNA molecule for generation of DNA nanostructure
acggggtctaaccgatatattttttcggtcgctgaggcgttgcgcc

SEQ ID NO: 3160 - DNA, 46 bp, Artificial sequence
  artificial DNA molecule for generation of DNA nanostructure
tttgctcagttttttccaggcggattaatttttgccccctgcctat

SEQ ID NO: 3161 - DNA, 40 bp, Artificial sequence
  artificial DNA molecule for generation of DNA nanostructure
ggcagattgcaaaaatcgcgcagaaactatatattaagac

SEQ ID NO: 3162 - DNA, 34 bp, Artificial sequence
  artificial DNA molecule for generation of DNA nanostructure
tagcccccgaagcaaactccagacccccagcgat

SEQ ID NO: 3163 - DNA, 46 bp, Artificial sequence
  artificial DNA molecule for generation of DNA nanostructure
cagggatatgaaagcgtaagaggaggtttagactatggccggaacc

SEQ ID NO: 3164 - DNA, 43 bp, Artificial sequence
  artificial DNA molecule for generation of DNA nanostructure
cgtcaccgccaccctcagtttttgccaccaccctcatcctcat

SEQ ID NO: 3165 - DNA, 56 bp, Artificial sequence
  artificial DNA molecule for generation of DNA nanostructure
tcggcattctcagagcccagtaagcaccggaataccgccactcagagcacactgag

SEQ ID NO: 3166 - DNA, 44 bp, Artificial sequence
  artificial DNA molecule for generation of DNA nanostructure
cctttagcgtcagactttttgtagcgcgttttcatagcgacaga

SEQ ID NO: 3167 - DNA, 47 bp, Artificial sequence
  artificial DNA molecule for generation of DNA nanostructure
gcgcattagacgggagaattaacgccgcgctatcaatttcatttgaa

SEQ ID NO: 3168 - DNA, 56 bp, Artificial sequence
  artificial DNA molecule for generation of DNA nanostructure
gcagcaccacataaaaccgcctccttcggtcaagagccacatatcgcgaagaggaa

SEQ ID NO: 3169 - DNA, 49 bp, Artificial sequence
  artificial DNA molecule for generation of DNA nanostructure
ccttgctgaagaaccgttggggcgctggcaagtgtgagcgctaatatca

SEQ ID NO: 3170 - DNA, 39 bp, Artificial sequence
  artificial DNA molecule for generation of DNA nanostructure
cgctgcgaagagtctgtccatcagctcaatctcaattac

SEQ ID NO: 3171 - DNA, 40 bp, Artificial sequence
  artificial DNA molecule for generation of DNA nanostructure
taagtgccgtcgagaggaattttccccacgcacgcctgta

SEQ ID NO: 3172 - DNA, 32 bp, Artificial sequence
  artificial DNA molecule for generation of DNA nanostructure
ccagtacataagtataaccgccacgagtaaca

SEQ ID NO: 3173 - DNA, 39 bp, Artificial sequence
  artificial DNA molecule for generation of DNA nanostructure
gagaatgatattataggttttgccgacgacgataaaaac

SEQ ID NO: 3174 - DNA, 48 bp, Artificial sequence
  artificial DNA molecule for generation of DNA nanostructure
gtctgaaatagtctttaatgcgcgcatattccattatttgcacgtaaa

SEQ ID NO: 3175 - DNA, 47 bp, Artificial sequence
  artificial DNA molecule for generation of DNA nanostructure
aaccctcgcccgaaaaggtcttttttcgtcacagacagctcgtcttt

SEQ ID NO: 3176 - DNA, 40 bp, Artificial sequence
  artificial DNA molecule for generation of DNA nanostructure
catcgggagccctaaaatacctacattttgaccgcaaatt

SEQ ID NO: 3177 - DNA, 44 bp, Artificial sequence
  artificial DNA molecule for generation of DNA nanostructure
ctctgaattgatgatacagtttttagtgtactgtaaacaaataa

SEQ ID NO: 3178 - DNA, 44 bp, Artificial sequence
  artificial DNA molecule for generation of DNA nanostructure
taaagccatttttaatggaaagcgcagtgtgcccgtataaacag

SEQ ID NO: 3179 - DNA, 52 bp, Artificial sequence
  artificial DNA molecule for generation of DNA nanostructure
acaaccatcgtgtatgggattttgctaaacaattttttttcaacagtttcag

SEQ ID NO: 3180 - DNA, 39 bp, Artificial sequence
  artificial DNA molecule for generation of DNA nanostructure
taatggaagggttagaatcataattcgcaagaaacgctc

SEQ ID NO: 3181 - DNA, 32 bp, Artificial sequence
  artificial DNA molecule for generation of DNA nanostructure
caccagaaggagcggaattatcataactgata

SEQ ID NO: 3182 - DNA, 42 bp, Artificial sequence
  artificial DNA molecule for generation of DNA nanostructure
tcatggaaacatcgccattaaaaaaaagaaactgcgtagatt

SEQ ID NO: 3183 - DNA, 37 bp, Artificial sequence
  artificial DNA molecule for generation of DNA nanostructure
aactaatgtagcgaaccagaccgttattagtagcagc

SEQ ID NO: 3184 - DNA, 48 bp, Artificial sequence
  artificial DNA molecule for generation of DNA nanostructure
tttgtttaacgtcaaacatattattgaaaacacaggcagaggcatttt

SEQ ID NO: 3185 - DNA, 34 bp, Artificial sequence
  artificial DNA molecule for generation of DNA nanostructure
tagcaatagcacataaatcaatagaattttaatg

SEQ ID NO: 3186 - DNA, 47 bp, Artificial sequence
  artificial DNA molecule for generation of DNA nanostructure
tgattatcagatgatggcaattctttttgaaaataccaagttacagc

SEQ ID NO: 3187 - DNA, 47 bp, Artificial sequence
  artificial DNA molecule for generation of DNA nanostructure
ttgtttgacgatctatcaccgtagtaccgtacaccacccaaaagatt

SEQ ID NO: 3188 - DNA, 48 bp, Artificial sequence
  artificial DNA molecule for generation of DNA nanostructure
ccagacgttagtaaatggttgataaactacaaagtgccttcctcagaa

SEQ ID NO: 3189 - DNA, 38 bp, Artificial sequence
  artificial DNA molecule for generation of DNA nanostructure
tgccctgacttgacaagaaccggattttttttcattac

SEQ ID NO: 3190 - DNA, 38 bp, Artificial sequence
  artificial DNA molecule for generation of DNA nanostructure
aagctgctcatttttttagtgaataaggcttaccgata

SEQ ID NO: 3191 - DNA, 76 bp, Artificial sequence
  artificial DNA molecule for generation of DNA nanostructure
gcagtagagtaggtagagattaggcaggaaacgccctattttatcctgaaagcctaatttttttgccagatccaaa

SEQ ID NO: 3192 - DNA, 50 bp, Artificial sequence
  artificial DNA molecule for generation of DNA nanostructure
gcagtagagtaggtagagattaggcagtatgttagcaaacgttggggcgc

SEQ ID NO: 3193 - DNA, 58 bp, Artificial sequence
  artificial DNA molecule for generation of DNA nanostructure
gcagtagagtaggtagagattaggcatgttgttccgagcgtccaaaaggttcaagttg

SEQ ID NO: 3194 - DNA, 66 bp, Artificial sequence
  artificial DNA molecule for generation of DNA nanostructure
gcagtagagtaggtagagattaggcaacttgagccatttgggaattagagaatatgcaactaaagt

SEQ ID NO: 3195 - DNA, 70 bp, Artificial sequence
  artificial DNA molecule for generation of DNA nanostructure
gcagtagagtaggtagagattaggcaaagtacaaaagggcgacattattcccaagagttgcagcccttca

SEQ ID NO: 3196 - DNA, 65 bp, Artificial sequence
  artificial DNA molecule for generation of DNA nanostructure
gcagtagagtaggtagagattaggcatagagcttccttataacctgttcttcgtgccccagcagg

SEQ ID NO: 3197 - DNA, 58 bp, Artificial sequence
  artificial DNA molecule for generation of DNA nanostructure
gcagtagagtaggtagagattaggcaagagaatatttacaggtcaggattagaggtca

SEQ ID NO: 3198 - DNA, 58 bp, Artificial sequence
  artificial DNA molecule for generation of DNA nanostructure
gcagtagagtaggtagagattaggcaaagtcagagggtaattagcggtcagaaacagt

SEQ ID NO: 3199 - DNA, 64 bp, Artificial sequence
  artificial DNA molecule for generation of DNA nanostructure
gcagtagagtaggtagagattaggcataatatgtgagtgtttttataagagcaagaaagcagat

SEQ ID NO: 3200 - DNA, 50 bp, Artificial sequence
  artificial DNA molecule for generation of DNA nanostructure
ggaaacgccctattttatcctgaaagcctaatttttttgccagatccaaa

SEQ ID NO: 3201 - DNA, 24 bp, Artificial sequence
  artificial DNA molecule for generation of DNA nanostructure
gtatgttagcaaacgttggggcgc

SEQ ID NO: 3202 - DNA, 32 bp, Artificial sequence
  artificial DNA molecule for generation of DNA nanostructure
tgttgttccgagcgtccaaaaggttcaagttg

SEQ ID NO: 3203 - DNA, 40 bp, Artificial sequence
  artificial DNA molecule for generation of DNA nanostructure
acttgagccatttgggaattagagaatatgcaactaaagt

SEQ ID NO: 3204 - DNA, 44 bp, Artificial sequence
  artificial DNA molecule for generation of DNA nanostructure
aagtacaaaagggcgacattattcccaagagttgcagcccttca

SEQ ID NO: 3205 - DNA, 39 bp, Artificial sequence
  artificial DNA molecule for generation of DNA nanostructure
tagagcttccttataacctgttcttcgtgccccagcagg

SEQ ID NO: 3206 - DNA, 32 bp, Artificial sequence
  artificial DNA molecule for generation of DNA nanostructure
agagaatatttacaggtcaggattagaggtca

SEQ ID NO: 3207 - DNA, 32 bp, Artificial sequence
  artificial DNA molecule for generation of DNA nanostructure
aagtcagagggtaattagcggtcagaaacagt

SEQ ID NO: 3208 - DNA, 38 bp, Artificial sequence
  artificial DNA molecule for generation of DNA nanostructure
taatatgtgagtgtttttataagagcaagaaagcagat

SEQ ID NO: 3209 - DNA, 41 bp, Artificial sequence
  artificial DNA molecule for generation of DNA nanostructure
tctaaaactgattgtaaacgttccaataggaacgccatcaa

SEQ ID NO: 3210 - DNA, 40 bp, Artificial sequence
  artificial DNA molecule for generation of DNA nanostructure
acagcggtcgcattccaaaaatcatcaacattaaatgtga

SEQ ID NO: 3211 - DNA, 45 bp, Artificial sequence
  artificial DNA molecule for generation of DNA nanostructure
acatccaataaatggttgtacttgtataaattttctgctcatttg

SEQ ID NO: 3212 - DNA, 37 bp, Artificial sequence
  artificial DNA molecule for generation of DNA nanostructure
ttaagcaataaagtgacggggcggaatacgaaaccga

SEQ ID NO: 3213 - DNA, 32 bp, Artificial sequence
  artificial DNA molecule for generation of DNA nanostructure
aaataattcgccaaggcaaagaattagcaaaa

SEQ ID NO: 3214 - DNA, 36 bp, Artificial sequence
  artificial DNA molecule for generation of DNA nanostructure
tagagctcctcagagcataaagcagtagtagcatta

SEQ ID NO: 3215 - DNA, 43 bp, Artificial sequence
  artificial DNA molecule for generation of DNA nanostructure
gcgagtaatttttgttaaatcagctcagccagcttcaggaaga

SEQ ID NO: 3216 - DNA, 35 bp, Artificial sequence
  artificial DNA molecule for generation of DNA nanostructure
agaggctgagaattgcgaattcttaaacagcttga

SEQ ID NO: 3217 - DNA, 40 bp, Artificial sequence
  artificial DNA molecule for generation of DNA nanostructure
aggttgaggggtaaaatacgtggagataaatttgaacggt

SEQ ID NO: 3218 - DNA, 35 bp, Artificial sequence
  artificial DNA molecule for generation of DNA nanostructure
agagccgcgacgattggccttgattgaaagtatta

SEQ ID NO: 3219 - DNA, 52 bp, Artificial sequence
  artificial DNA molecule for generation of DNA nanostructure
tagtttgaccattagatacattaaaagaaacgcaaagacaccacgaaggtga

SEQ ID NO: 3220 - DNA, 38 bp, Artificial sequence
  artificial DNA molecule for generation of DNA nanostructure
cgagggtattaaacgcaggtcacgccagcattgacagg

SEQ ID NO: 3221 - DNA, 32 bp, Artificial sequence
  artificial DNA molecule for generation of DNA nanostructure
atcaggtcaatatgatgagatctacgccaggg

SEQ ID NO: 3222 - DNA, 37 bp, Artificial sequence
  artificial DNA molecule for generation of DNA nanostructure
agagtctggagcaaacatatattttaaatagtagatt

SEQ ID NO: 3223 - DNA, 40 bp, Artificial sequence
  artificial DNA molecule for generation of DNA nanostructure
ttctgcgatcaccatcattgcctgagtttgagcaaaggct

SEQ ID NO: 3224 - DNA, 36 bp, Artificial sequence
  artificial DNA molecule for generation of DNA nanostructure
gtttttaacggtacgccagaatcttgctttgacgag

SEQ ID NO: 3225 - DNA, 40 bp, Artificial sequence
  artificial DNA molecule for generation of DNA nanostructure
ttctgacccaccagtcaacagagaagacaataatcaatat

SEQ ID NO: 3226 - DNA, 37 bp, Artificial sequence
  artificial DNA molecule for generation of DNA nanostructure
ggcgaatcaaaattcgagtaacgtaaccacaggaggc

SEQ ID NO: 3227 - DNA, 40 bp, Artificial sequence
  artificial DNA molecule for generation of DNA nanostructure
cgattaaagggattttgagctaaaccacaccctgaacacc

SEQ ID NO: 3228 - DNA, 47 bp, Artificial sequence
  artificial DNA molecule for generation of DNA nanostructure
aagggacattctggccacacgacctttacattgaggccacaattaca

SEQ ID NO: 3229 - DNA, 30 bp, Artificial sequence
  artificial DNA molecule for generation of DNA nanostructure
aacccatctcaatacgtggcactagaaccc

SEQ ID NO: 3230 - DNA, 36 bp, Artificial sequence
  artificial DNA molecule for generation of DNA nanostructure
acctacctgctttgtggctattggattaagtaataa

SEQ ID NO: 3231 - DNA, 37 bp, Artificial sequence
  artificial DNA molecule for generation of DNA nanostructure
cacgtataacgtggggcgcgtacagggaactttacag

SEQ ID NO: 3232 - DNA, 46 bp, Artificial sequence
  artificial DNA molecule for generation of DNA nanostructure
tctaaaactgattgtaaacgttccaataggaacgccatcaattttt

SEQ ID NO: 3233 - DNA, 45 bp, Artificial sequence
  artificial DNA molecule for generation of DNA nanostructure
acagcggtcgcattccaaaaatcatcaacattaaatgtgattttt

SEQ ID NO: 3234 - DNA, 50 bp, Artificial sequence
  artificial DNA molecule for generation of DNA nanostructure
tttttacatccaataaatggttgtacttgtataaattttctgctcatttg

SEQ ID NO: 3235 - DNA, 42 bp, Artificial sequence
  artificial DNA molecule for generation of DNA nanostructure
tttttttaagcaataaagtgacggggcggaatacgaaaccga

SEQ ID NO: 3236 - DNA, 42 bp, Artificial sequence
  artificial DNA molecule for generation of DNA nanostructure
tttttaaataattcgccaaggcaaagaattagcaaaattttt

SEQ ID NO: 3237 - DNA, 41 bp, Artificial sequence
  artificial DNA molecule for generation of DNA nanostructure
tagagctcctcagagcataaagcagtagtagcattattttt

SEQ ID NO: 3238 - DNA, 48 bp, Artificial sequence
  artificial DNA molecule for generation of DNA nanostructure
tttttgcgagtaatttttgttaaatcagctcagccagcttcaggaaga

SEQ ID NO: 3239 - DNA, 40 bp, Artificial sequence
  artificial DNA molecule for generation of DNA nanostructure
tttttagaggctgagaattgcgaattcttaaacagcttga

SEQ ID NO: 3240 - DNA, 45 bp, Artificial sequence
  artificial DNA molecule for generation of DNA nanostructure
tttttaggttgaggggtaaaatacgtggagataaatttgaacggt

SEQ ID NO: 3241 - DNA, 40 bp, Artificial sequence
  artificial DNA molecule for generation of DNA nanostructure
agagccgcgacgattggccttgattgaaagtattattttt

SEQ ID NO: 3242 - DNA, 57 bp, Artificial sequence
  artificial DNA molecule for generation of DNA nanostructure
ttttttagtttgaccattagatacattaaaagaaacgcaaagacaccacgaaggtga

SEQ ID NO: 3243 - DNA, 43 bp, Artificial sequence
  artificial DNA molecule for generation of DNA nanostructure
cgagggtattaaacgcaggtcacgccagcattgacaggttttt

SEQ ID NO: 3244 - DNA, 37 bp, Artificial sequence
  artificial DNA molecule for generation of DNA nanostructure
tttttatcaggtcaatatgatgagatctacgccaggg

SEQ ID NO: 3245 - DNA, 42 bp, Artificial sequence
  artificial DNA molecule for generation of DNA nanostructure
agagtctggagcaaacatatattttaaatagtagattttttt

SEQ ID NO: 3246 - DNA, 45 bp, Artificial sequence
  artificial DNA molecule for generation of DNA nanostructure
ttctgcgatcaccatcattgcctgagtttgagcaaaggctttttt

SEQ ID NO: 3247 - DNA, 41 bp, Artificial sequence
  artificial DNA molecule for generation of DNA nanostructure
gtttttaacggtacgccagaatcttgctttgacgagttttt

SEQ ID NO: 3248 - DNA, 45 bp, Artificial sequence
  artificial DNA molecule for generation of DNA nanostructure
tttttttctgacccaccagtcaacagagaagacaataatcaatat

SEQ ID NO: 3249 - DNA, 42 bp, Artificial sequence
  artificial DNA molecule for generation of DNA nanostructure
ggcgaatcaaaattcgagtaacgtaaccacaggaggcttttt

SEQ ID NO: 3250 - DNA, 45 bp, Artificial sequence
  artificial DNA molecule for generation of DNA nanostructure
tttttcgattaaagggattttgagctaaaccacaccctgaacacc

SEQ ID NO: 3251 - DNA, 52 bp, Artificial sequence
  artificial DNA molecule for generation of DNA nanostructure
tttttaagggacattctggccacacgacctttacattgaggccacaattaca

SEQ ID NO: 3252 - DNA, 35 bp, Artificial sequence
  artificial DNA molecule for generation of DNA nanostructure
aacccatctcaatacgtggcactagaacccttttt

SEQ ID NO: 3253 - DNA, 41 bp, Artificial sequence
  artificial DNA molecule for generation of DNA nanostructure
acctacctgctttgtggctattggattaagtaataattttt

SEQ ID NO: 3254 - DNA, 42 bp, Artificial sequence
  artificial DNA molecule for generation of DNA nanostructure
tttttcacgtataacgtggggcgcgtacagggaactttacag

SEQ ID NO: 3255 - DNA, 40 bp, Artificial sequence
  artificial DNA molecule for generation of DNA nanostructure
caggcgaagcttacggtctggtcagcagcaacaaagccgc

SEQ ID NO: 3256 - DNA, 40 bp, Artificial sequence
  artificial DNA molecule for generation of DNA nanostructure
gccttattatcagggcgatggcccgggcgaaagaaaggaa

SEQ ID NO: 3257 - DNA, 36 bp, Artificial sequence
  artificial DNA molecule for generation of DNA nanostructure
tatagcctttttggaataggtgtatctaagtgccgt

SEQ ID NO: 3258 - DNA, 39 bp, Artificial sequence
  artificial DNA molecule for generation of DNA nanostructure
caagttttactattaacgctagggacacccgcacgacca

SEQ ID NO: 3259 - DNA, 56 bp, Artificial sequence
  artificial DNA molecule for generation of DNA nanostructure
agagccgccaccggaatgtaatttaatataaaacgacgacaataaacaacatgttc

SEQ ID NO: 3260 - DNA, 43 bp, Artificial sequence
  artificial DNA molecule for generation of DNA nanostructure
acgcaatataacccacaagtttttattgagttaagctaatatc

SEQ ID NO: 3261 - DNA, 46 bp, Artificial sequence
  artificial DNA molecule for generation of DNA nanostructure
tttgcccgaacgacccagagccaccaccctcattttcagggatagc

SEQ ID NO: 3262 - DNA, 38 bp, Artificial sequence
  artificial DNA molecule for generation of DNA nanostructure
gactccttaaagttaccagaaggaatttttccgaggaa

SEQ ID NO: 3263 - DNA, 40 bp, Artificial sequence
  artificial DNA molecule for generation of DNA nanostructure
acgtcaaaactacgtgggaaagccaagtattatagataat

SEQ ID NO: 3264 - DNA, 42 bp, Artificial sequence
  artificial DNA molecule for generation of DNA nanostructure
gcgtctttttgagcgcccaataataatcacctttttgtagca

SEQ ID NO: 3265 - DNA, 46 bp, Artificial sequence
  artificial DNA molecule for generation of DNA nanostructure
gtaaatcgttatccggtattttttttaagaacgcgaggccgcgccc

SEQ ID NO: 3266 - DNA, 40 bp, Artificial sequence
  artificial DNA molecule for generation of DNA nanostructure
acagtagggctaatcaaaagaatagctacagggggaagaa

SEQ ID NO: 3267 - DNA, 48 bp, Artificial sequence
  artificial DNA molecule for generation of DNA nanostructure
cacttgcctgagttgaaaccatcgcccccttattagctctgtccatca

SEQ ID NO: 3268 - DNA, 48 bp, Artificial sequence
  artificial DNA molecule for generation of DNA nanostructure
ctcagtactcagaacctgcggaaccaggaggtccttttttccaccacc

SEQ ID NO: 3269 - DNA, 34 bp, Artificial sequence
  artificial DNA molecule for generation of DNA nanostructure
cgtaacgatcttggggtcgaggtacaacccaaat

SEQ ID NO: 3270 - DNA, 48 bp, Artificial sequence
  artificial DNA molecule for generation of DNA nanostructure
aactcgtattaaatccggatttagggcgaacgattcgccagccattgc

SEQ ID NO: 3271 - DNA, 52 bp, Artificial sequence
  artificial DNA molecule for generation of DNA nanostructure
ccaccctcccattacctcagtagcgacagaatcaattttttttgagacacca

SEQ ID NO: 3272 - DNA, 44 bp, Artificial sequence
  artificial DNA molecule for generation of DNA nanostructure
taaccgttatcagtgaggccaccgtggtttaatcggcaaaatcc

SEQ ID NO: 3273 - DNA, 37 bp, Artificial sequence
  artificial DNA molecule for generation of DNA nanostructure
tataaccgccaccctacgctcaaattttaaaagttta

SEQ ID NO: 3274 - DNA, 39 bp, Artificial sequence
  artificial DNA molecule for generation of DNA nanostructure
ggcggttgtgtacatccgtaacactgagtttcgtcacca

SEQ ID NO: 3275 - DNA, 56 bp, Artificial sequence
  artificial DNA molecule for generation of DNA nanostructure
tcaagagatttttggattagattatcatcattttttttcctgattatcgcaaaaga

SEQ ID NO: 3276 - DNA, 32 bp, Artificial sequence
  artificial DNA molecule for generation of DNA nanostructure
caccagaaggagcggagattagcggggttttg

SEQ ID NO: 3277 - DNA, 51 bp, Artificial sequence
  artificial DNA molecule for generation of DNA nanostructure
agatgatgtttttaacaaacatcaagaattcccttagaatccttaataaac

SEQ ID NO: 3278 - DNA, 30 bp, Artificial sequence
  artificial DNA molecule for generation of DNA nanostructure
cgacttgcgccagcattgacgaaaccgtct

SEQ ID NO: 3279 - DNA, 47 bp, Artificial sequence
  artificial DNA molecule for generation of DNA nanostructure
cgccatatttaacaataaagccacagagccaagagccgcagccattt

SEQ ID NO: 3280 - DNA, 47 bp, Artificial sequence
  artificial DNA molecule for generation of DNA nanostructure
cttatataatgctttgagaggtttgccatcttttcataatgggagag

SEQ ID NO: 3281 - DNA, 32 bp, Artificial sequence
  artificial DNA molecule for generation of DNA nanostructure
aatcctgtttccagtttggtcgtcgctggcag

SEQ ID NO: 3282 - DNA, 39 bp, Artificial sequence
  artificial DNA molecule for generation of DNA nanostructure
gcgcgtaccaaagaagaactcaaactatcggccttgcac

SEQ ID NO: 3283 - DNA, 48 bp, Artificial sequence
  artificial DNA molecule for generation of DNA nanostructure
ccagctgcattaatgacgtattgggcgccagggagtaaaacgagcacg

SEQ ID NO: 3284 - DNA, 42 bp, Artificial sequence
  artificial DNA molecule for generation of DNA nanostructure
aatatccagcgaaattgacggaaccatcattcgacaagccca

SEQ ID NO: 3285 - DNA, 45 bp, Artificial sequence
  artificial DNA molecule for generation of DNA nanostructure
gggaaggtaaattttttttgagggaattagtttttgccaggccaa

SEQ ID NO: 3286 - DNA, 40 bp, Artificial sequence
  artificial DNA molecule for generation of DNA nanostructure
aacgcgcgaagtaattctgtccaggtaccgacaaaaggta

SEQ ID NO: 3287 - DNA, 52 bp, Artificial sequence
  artificial DNA molecule for generation of DNA nanostructure
aaatcagatacagaacgcgcctgtttatcaactttttatagataagtcctga

SEQ ID NO: 3288 - DNA, 37 bp, Artificial sequence
  artificial DNA molecule for generation of DNA nanostructure
cggaaattattcattaaagccatcacaaacaaataaa

SEQ ID NO: 3289 - DNA, 32 bp, Artificial sequence
  artificial DNA molecule for generation of DNA nanostructure
agaacaatattacatcaccgtcacaacgtcac

SEQ ID NO: 3290 - DNA, 39 bp, Artificial sequence
  artificial DNA molecule for generation of DNA nanostructure
caaaatcactcagagccaccgtaaattagcaaggccgga

SEQ ID NO: 3291 - DNA, 47 bp, Artificial sequence
  artificial DNA molecule for generation of DNA nanostructure
cgcgcttatgctttccggttccgattcttttcgggaaacctgtcgtg

SEQ ID NO: 3292 - DNA, 42 bp, Artificial sequence
  artificial DNA molecule for generation of DNA nanostructure
cgcaaatataacattataacgatgcgccgcccgaggactcca

SEQ ID NO: 3293 - DNA, 42 bp, Artificial sequence
  artificial DNA molecule for generation of DNA nanostructure
ggtgctggctggaggtgtccagcatcacattacaccgcctgg

SEQ ID NO: 3294 - DNA, 38 bp, Artificial sequence
  artificial DNA molecule for generation of DNA nanostructure
cgccaccctcagggtttgagaatgcggtttgatcggcc

SEQ ID NO: 3295 - DNA, 46 bp, Artificial sequence
  artificial DNA molecule for generation of DNA nanostructure
taaataaggctttttttaaataaggaaatttttcatagcgatagct

SEQ ID NO: 3296 - DNA, 46 bp, Artificial sequence
  artificial DNA molecule for generation of DNA nanostructure
ccgcctccccggaaccttcatcggcattttcggtcatagatagcag

SEQ ID NO: 3297 - DNA, 47 bp, Artificial sequence
  artificial DNA molecule for generation of DNA nanostructure
agagagacaccagaaaatggaaacaaattcttaccagtacgccaaca

SEQ ID NO: 3298 - DNA, 34 bp, Artificial sequence
  artificial DNA molecule for generation of DNA nanostructure
ttagtaccgcaggtcagacgatagcagcctttac

SEQ ID NO: 3299 - DNA, 32 bp, Artificial sequence
  artificial DNA molecule for generation of DNA nanostructure
attgcgttgcgctcactgcccgctcgcaacca

SEQ ID NO: 3300 - DNA, 52 bp, Artificial sequence
  artificial DNA molecule for generation of DNA nanostructure
ataattacgcattttctcgctattgcgttatacagtacataaatcaatatat

SEQ ID NO: 3301 - DNA, 45 bp, Artificial sequence
  artificial DNA molecule for generation of DNA nanostructure
accggaatcagctaatgtagaaggcgagccagtatacccaaaaga

SEQ ID NO: 3302 - DNA, 46 bp, Artificial sequence
  artificial DNA molecule for generation of DNA nanostructure
tgccggaaacaatcgacgaaggcaccacacggaaaaaggtgagaat

SEQ ID NO: 3303 - DNA, 46 bp, Artificial sequence
  artificial DNA molecule for generation of DNA nanostructure
tcagcggggttttttattgcaggccttgtttttagaacgtcagcgt

SEQ ID NO: 3304 - DNA, 40 bp, Artificial sequence
  artificial DNA molecule for generation of DNA nanostructure
gctttcgcactcaatcggaagcatgttgcagcgctcgaat

SEQ ID NO: 3305 - DNA, 49 bp, Artificial sequence
  artificial DNA molecule for generation of DNA nanostructure
acaattccacacaacatacgagcccgccgggcggtaccgacagagcaca

SEQ ID NO: 3306 - DNA, 47 bp, Artificial sequence
  artificial DNA molecule for generation of DNA nanostructure
cctgactattatagtcagaagcaggcttgagtagctcaacatgtgcg

SEQ ID NO: 3307 - DNA, 32 bp, Artificial sequence
  artificial DNA molecule for generation of DNA nanostructure
gaatgaccataaatcaaaaatcagattgtgaa

SEQ ID NO: 3308 - DNA, 48 bp, Artificial sequence
  artificial DNA molecule for generation of DNA nanostructure
gcggttgcctgcggccatcctcatctgattgccgttcagagatcaaac

SEQ ID NO: 3309 - DNA, 40 bp, Artificial sequence
  artificial DNA molecule for generation of DNA nanostructure
ggtatgagccgggtcaatccgctcagctgtttcctgtgtg

SEQ ID NO: 3310 - DNA, 40 bp, Artificial sequence
  artificial DNA molecule for generation of DNA nanostructure
ctgttgcctccgtgaggtcatacctaaagcatatcaatat

SEQ ID NO: 3311 - DNA, 46 bp, Artificial sequence
  artificial DNA molecule for generation of DNA nanostructure
agcggtggtgtcacctttgctcgtcataaacatccctttcagatgc

SEQ ID NO: 3312 - DNA, 48 bp, Artificial sequence
  artificial DNA molecule for generation of DNA nanostructure
ccctgcataagcggatagacttcaaatatcgccggagagggaaccctc

SEQ ID NO: 3313 - DNA, 40 bp, Artificial sequence
  artificial DNA molecule for generation of DNA nanostructure
tgtgcactttttcacgcctcctcacaacagtgggcggtca

SEQ ID NO: 3314 - DNA, 42 bp, Artificial sequence
  artificial DNA molecule for generation of DNA nanostructure
aacagcttgactatattttcattttctcaataacccattaaa

SEQ ID NO: 3315 - DNA, 48 bp, Artificial sequence
  artificial DNA molecule for generation of DNA nanostructure
acaccagaaatttcaactttaatcgtctttactcaaagcgaaccagac

SEQ ID NO: 3316 - DNA, 32 bp, Artificial sequence
  artificial DNA molecule for generation of DNA nanostructure
acatttcgccaataaacgacggcctttcccag

SEQ ID NO: 3317 - DNA, 42 bp, Artificial sequence
  artificial DNA molecule for generation of DNA nanostructure
cattcagttgcgattttaagaactgaaaacgacaggtcagga

SEQ ID NO: 3318 - DNA, 52 bp, Artificial sequence
  artificial DNA molecule for generation of DNA nanostructure
aagagtcctaaagttttgtcgtctttttttccagacgttagttcatagttag

SEQ ID NO: 3319 - DNA, 44 bp, Artificial sequence
  artificial DNA molecule for generation of DNA nanostructure
gatgaaggttttttaaagttaaacgatgaacggaacgtgccgga

SEQ ID NO: 3320 - DNA, 47 bp, Artificial sequence
  artificial DNA molecule for generation of DNA nanostructure
accataaacaaagaataacgcaagctttgaacggtagcatgtcaatc

SEQ ID NO: 3321 - DNA, 32 bp, Artificial sequence
  artificial DNA molecule for generation of DNA nanostructure
cacccgcgacctgctcgacgagaatggaagtt

SEQ ID NO: 3322 - DNA, 40 bp, Artificial sequence
  artificial DNA molecule for generation of DNA nanostructure
ttaaatttctacaacgcctgtagcattccacatcagcgga

SEQ ID NO: 3323 - DNA, 42 bp, Artificial sequence
  artificial DNA molecule for generation of DNA nanostructure
gagatctggagcaaatatattagaagccctaaagtagtagat

SEQ ID NO: 3324 - DNA, 37 bp, Artificial sequence
  artificial DNA molecule for generation of DNA nanostructure
agccctaaaacatcgccattaaagcgtaagagagcca

SEQ ID NO: 3325 - DNA, 40 bp, Artificial sequence
  artificial DNA molecule for generation of DNA nanostructure
gaactgatgtattaacgggatttttcgtaatcgatccccg

SEQ ID NO: 3326 - DNA, 40 bp, Artificial sequence
  artificial DNA molecule for generation of DNA nanostructure
agacgcagtttctgtacccggaataaccctcacaccttgc

SEQ ID NO: 3327 - DNA, 47 bp, Artificial sequence
  artificial DNA molecule for generation of DNA nanostructure
ggaagtttctgtttagcccaattctcagagcagtaatactaccaata

SEQ ID NO: 3328 - DNA, 39 bp, Artificial sequence
  artificial DNA molecule for generation of DNA nanostructure
aaagactttttcatgaccaaaaaaaaggctccaaaagga

SEQ ID NO: 3329 - DNA, 43 bp, Artificial sequence
  artificial DNA molecule for generation of DNA nanostructure
gtacaaactgctcatttgtttttcgccagcagttgcctttagt

SEQ ID NO: 3330 - DNA, 32 bp, Artificial sequence
  artificial DNA molecule for generation of DNA nanostructure
gcgaataagagccgccacgggaacttgtaaaa

SEQ ID NO: 3331 - DNA, 31 bp, Artificial sequence
  artificial DNA molecule for generation of DNA nanostructure
gagagtctacaaaggcctgataaattaatgc

SEQ ID NO: 3332 - DNA, 48 bp, Artificial sequence
  artificial DNA molecule for generation of DNA nanostructure
acaagagaatcgactgacctgaaaaataccgaacgaagctatttttga

SEQ ID NO: 3333 - DNA, 40 bp, Artificial sequence
  artificial DNA molecule for generation of DNA nanostructure
acaactttcaacagttatcggaaggttatctagattagag

SEQ ID NO: 3334 - DNA, 39 bp, Artificial sequence
  artificial DNA molecule for generation of DNA nanostructure
aagtgtaaaatatcattgtgagagcgggccgctgtggtg

SEQ ID NO: 3335 - DNA, 48 bp, Artificial sequence
  artificial DNA molecule for generation of DNA nanostructure
tgggattttgaaaggaattgaggaaccctaaaggtttttagcccccga

SEQ ID NO: 3336 - DNA, 43 bp, Artificial sequence
  artificial DNA molecule for generation of DNA nanostructure
cgattaaagcggtcacgcttttttcgcgtaaccacccgctggc

SEQ ID NO: 3337 - DNA, 40 bp, Artificial sequence
  artificial DNA molecule for generation of DNA nanostructure
atatgttatttgcgggttaaatgcctgaatatttcgagct

SEQ ID NO: 3338 - DNA, 52 bp, Artificial sequence
  artificial DNA molecule for generation of DNA nanostructure
aagggacagcacagacaatatttttgattttttggcacttctttgattagta

SEQ ID NO: 3339 - DNA, 39 bp, Artificial sequence
  artificial DNA molecule for generation of DNA nanostructure
gtaataatgaacctcaccgcctgcagttgagatggtcat

SEQ ID NO: 3340 - DNA, 39 bp, Artificial sequence
  artificial DNA molecule for generation of DNA nanostructure
aaagcatcgtctgaaaatagaaccgataaatgaaaaatc

SEQ ID NO: 3341 - DNA, 52 bp, Artificial sequence
  artificial DNA molecule for generation of DNA nanostructure
ccctgagagaaaagtgtaaagcctggggtgcctttttaatgagtgagctaac

SEQ ID NO: 3342 - DNA, 38 bp, Artificial sequence
  artificial DNA molecule for generation of DNA nanostructure
tttttatagtagcaattattagtctttttttaatgcgc

SEQ ID NO: 3343 - DNA, 47 bp, Artificial sequence
  artificial DNA molecule for generation of DNA nanostructure
gcagcaaatgcctgttagcccgaatgcatcaaaaagattaaattgtt

SEQ ID NO: 3344 - DNA, 38 bp, Artificial sequence
  artificial DNA molecule for generation of DNA nanostructure
tggattactggtcagttggaggcgtacagctctgccag

SEQ ID NO: 3345 - DNA, 37 bp, Artificial sequence
  artificial DNA molecule for generation of DNA nanostructure
tttacatttggaaatacctacatactaataaaatatc

SEQ ID NO: 3346 - DNA, 46 bp, Artificial sequence
  artificial DNA molecule for generation of DNA nanostructure
cctccggcaagcggtccacgttttttggtttgccccagttgccctt

SEQ ID NO: 3347 - DNA, 51 bp, Artificial sequence
  artificial DNA molecule for generation of DNA nanostructure
gaatgcggatcggcaaacgcggtccgttttttttttcgtcaacacaggcgg

SEQ ID NO: 3348 - DNA, 31 bp, Artificial sequence
  artificial DNA molecule for generation of DNA nanostructure
tatgcaatttatttctagcaaaataatcaga

SEQ ID NO: 3349 - DNA, 41 bp, Artificial sequence
  artificial DNA molecule for generation of DNA nanostructure
cttaattgaatgcctgcgttctagtatcaggtccgtgggaa

SEQ ID NO: 3350 - DNA, 32 bp, Artificial sequence
  artificial DNA molecule for generation of DNA nanostructure
gcttagagtcattccatatctgaccttcatca

SEQ ID NO: 3351 - DNA, 48 bp, Artificial sequence
  artificial DNA molecule for generation of DNA nanostructure
tgcggatgttaccttagaataaggcttgccctcatgttacagttgatt

SEQ ID NO: 3352 - DNA, 45 bp, Artificial sequence
  artificial DNA molecule for generation of DNA nanostructure
aacaggaaaaactttttctcaggcagattctttttccagtctggt

SEQ ID NO: 3353 - DNA, 44 bp, Artificial sequence
  artificial DNA molecule for generation of DNA nanostructure
ttaacatcaaatggagaggtgtaattttttcacgttgaaaatct

SEQ ID NO: 3354 - DNA, 45 bp, Artificial sequence
  artificial DNA molecule for generation of DNA nanostructure
aatttttagtaccaccagcagaagataaaacaagaggacttcgcg

SEQ ID NO: 3355 - DNA, 40 bp, Artificial sequence
  artificial DNA molecule for generation of DNA nanostructure
ccgtcaagactttacaagccgtaaagctttttctaagaca

SEQ ID NO: 3356 - DNA, 38 bp, Artificial sequence
  artificial DNA molecule for generation of DNA nanostructure
gagaagtgatcagagcgggagctaatttttcaggaggc

SEQ ID NO: 3357 - DNA, 30 bp, Artificial sequence
  artificial DNA molecule for generation of DNA nanostructure
tttaggagggataacctcactaaagaaagg

SEQ ID NO: 3358 - DNA, 38 bp, Artificial sequence
  artificial DNA molecule for generation of DNA nanostructure
agacaggaacggtttttacgccagaatcctacagctga

SEQ ID NO: 3359 - DNA, 39 bp, Artificial sequence
  artificial DNA molecule for generation of DNA nanostructure
agaggtgaccacgctgaatacgtgttctggccaacagag

SEQ ID NO: 3360 - DNA, 42 bp, Artificial sequence
  artificial DNA molecule for generation of DNA nanostructure
ctactaatagtagtagcaataaagcctgcgaacgacggtgtc

SEQ ID NO: 3361 - DNA, 36 bp, Artificial sequence
  artificial DNA molecule for generation of DNA nanostructure
tcatacagtcacccaaaaacaggaagattgtataag

SEQ ID NO: 3362 - DNA, 40 bp, Artificial sequence
  artificial DNA molecule for generation of DNA nanostructure
gacgctgagaagagtccatttcaagctaacgagatataag

SEQ ID NO: 3363 - DNA, 38 bp, Artificial sequence
  artificial DNA molecule for generation of DNA nanostructure
atccaccgcttctggggaattaaaggccgattcgcctg

SEQ ID NO: 3364 - DNA, 44 bp, Artificial sequence
  artificial DNA molecule for generation of DNA nanostructure
taccgatagttgcgctttttgacaatgacaacaagaatttctta

SEQ ID NO: 3365 - DNA, 48 bp, Artificial sequence
  artificial DNA molecule for generation of DNA nanostructure
gagtgtactggtaatatccagtaaagacgggatttaccgattgaggga

SEQ ID NO: 3366 - DNA, 46 bp, Artificial sequence
  artificial DNA molecule for generation of DNA nanostructure
ggctcattattttttccagtcaggcaacttttttaacaaagctgct

SEQ ID NO: 3367 - DNA, 34 bp, Artificial sequence
  artificial DNA molecule for generation of DNA nanostructure
accgatatctcttcgctattaggtggcatcaatt

SEQ ID NO: 3368 - DNA, 47 bp, Artificial sequence
  artificial DNA molecule for generation of DNA nanostructure
tggtttaccagccaaaagagcaaaagcagatcgggaggtagccgttt

SEQ ID NO: 3369 - DNA, 47 bp, Artificial sequence
  artificial DNA molecule for generation of DNA nanostructure
ttaatgccccctgcctatttcggtctgaatacttaaacagccatatt

SEQ ID NO: 3370 - DNA, 32 bp, Artificial sequence
  artificial DNA molecule for generation of DNA nanostructure
agggcgacattcagttaaaattcgccttcctg

SEQ ID NO: 3371 - DNA, 30 bp, Artificial sequence
  artificial DNA molecule for generation of DNA nanostructure
cattaaattgggaagggcgttagggagtta

SEQ ID NO: 3372 - DNA, 48 bp, Artificial sequence
  artificial DNA molecule for generation of DNA nanostructure
acggtgtaccaactttcggaacgagggtagcaattgtatcggtttatc

SEQ ID NO: 3373 - DNA, 41 bp, Artificial sequence
  artificial DNA molecule for generation of DNA nanostructure
caaaatgcaactgaacacaatagcttagtagaaaattcata

SEQ ID NO: 3374 - DNA, 56 bp, Artificial sequence
  artificial DNA molecule for generation of DNA nanostructure
agcttgctgtgcccgtcagcgaaacacgcataggatcgtctcaggctgaccaggca

SEQ ID NO: 3375 - DNA, 49 bp, Artificial sequence
  artificial DNA molecule for generation of DNA nanostructure
tgagtgaaaacttacctgaagatgatggcaattcagaggctgagactcc

SEQ ID NO: 3376 - DNA, 43 bp, Artificial sequence
  artificial DNA molecule for generation of DNA nanostructure
gcctttaacggctacagatttttgctttgaggactaacgaggc

SEQ ID NO: 3377 - DNA, 40 bp, Artificial sequence
  artificial DNA molecule for generation of DNA nanostructure
aatcaaccagctttcatgtagatgggcgcatacataaagg

SEQ ID NO: 3378 - DNA, 31 bp, Artificial sequence
  artificial DNA molecule for generation of DNA nanostructure
cggaataatataaaaggtatgttagcaaacg

SEQ ID NO: 3379 - DNA, 39 bp, Artificial sequence
  artificial DNA molecule for generation of DNA nanostructure
atcctgagcagaggcgaattattaatagtgattttatcc

SEQ ID NO: 3380 - DNA, 40 bp, Artificial sequence
  artificial DNA molecule for generation of DNA nanostructure
aaacggcggattgaccacagtatcaaggccggtgcaaaag

SEQ ID NO: 3381 - DNA, 47 bp, Artificial sequence
  artificial DNA molecule for generation of DNA nanostructure
aagaacgtaaaatgtattattacaccctcgtcgccaaaatgccggaa

SEQ ID NO: 3382 - DNA, 46 bp, Artificial sequence
  artificial DNA molecule for generation of DNA nanostructure
agagtaattgctccttttgatttttaagaggtcattttaactccaa

SEQ ID NO: 3383 - DNA, 46 bp, Artificial sequence
  artificial DNA molecule for generation of DNA nanostructure
cgaggcatgcaagacaaagatagaaagattcatcaaaacttttgcg

SEQ ID NO: 3384 - DNA, 48 bp, Artificial sequence
  artificial DNA molecule for generation of DNA nanostructure
ccaatactgcggaatctctacgttaatagcgacttgacaacattcaac

SEQ ID NO: 3385 - DNA, 44 bp, Artificial sequence
  artificial DNA molecule for generation of DNA nanostructure
cgaactgacagaccaggcgtttttataggctggaacttagccgg

SEQ ID NO: 3386 - DNA, 44 bp, Artificial sequence
  artificial DNA molecule for generation of DNA nanostructure
gcagacggtttttcaatcataagggaactattcattacccaaat

SEQ ID NO: 3387 - DNA, 34 bp, Artificial sequence
  artificial DNA molecule for generation of DNA nanostructure
cgagagggttacgattttttgttgatccaatcca

SEQ ID NO: 3388 - DNA, 47 bp, Artificial sequence
  artificial DNA molecule for generation of DNA nanostructure
gaaaccaatcaataatcggctgtatatatttccttaaatcaagaaag

SEQ ID NO: 3389 - DNA, 42 bp, Artificial sequence
  artificial DNA molecule for generation of DNA nanostructure
tagattaaaataccgaccgtgtgaacaagaaaaatagcaagc

SEQ ID NO: 3390 - DNA, 37 bp, Artificial sequence
  artificial DNA molecule for generation of DNA nanostructure
gttaatatgaaatcggtgcgggcattcggtcggggtc

SEQ ID NO: 3391 - DNA, 42 bp, Artificial sequence
  artificial DNA molecule for generation of DNA nanostructure
aaataaatcagcttttttatttttaccccggttgattaagca

SEQ ID NO: 3392 - DNA, 32 bp, Artificial sequence
  artificial DNA molecule for generation of DNA nanostructure
aaaaccaaaataaaacgaataccagaaccgga

SEQ ID NO: 3393 - DNA, 38 bp, Artificial sequence
  artificial DNA molecule for generation of DNA nanostructure
agacagtcaaattttttaccatcaatatgacggaagca

SEQ ID NO: 3394 - DNA, 41 bp, Artificial sequence
  artificial DNA molecule for generation of DNA nanostructure
ccgacttgagccgaacattacgcaaaacgcaacctttagcg

SEQ ID NO: 3395 - DNA, 32 bp, Artificial sequence
  artificial DNA molecule for generation of DNA nanostructure
cgaacctctgaatcttacctaaccttgcttct

SEQ ID NO: 3396 - DNA, 48 bp, Artificial sequence
  artificial DNA molecule for generation of DNA nanostructure
atttatcatttcatcttctgacctagcatgtattattttcatcgtagg

SEQ ID NO: 3397 - DNA, 40 bp, Artificial sequence
  artificial DNA molecule for generation of DNA nanostructure
gagactacagtttagttgctattttgaaatagccctgaac

SEQ ID NO: 3398 - DNA, 32 bp, Artificial sequence
  artificial DNA molecule for generation of DNA nanostructure
aataatatcccatcctaatttacgaaatttaa

SEQ ID NO: 3399 - DNA, 52 bp, Artificial sequence
  artificial DNA molecule for generation of DNA nanostructure
ttagagagtatattcattgaatccccctcaaatttttgctttaaacagttca

SEQ ID NO: 3400 - DNA, 39 bp, Artificial sequence
  artificial DNA molecule for generation of DNA nanostructure
accgcactcatcgagatagaaaatctttttaattgtcac

SEQ ID NO: 3401 - DNA, 29 bp, Artificial sequence
  artificial DNA molecule for generation of DNA nanostructure
tggcaacagtttattgaaaagtgaaacaa

SEQ ID NO: 3402 - DNA, 32 bp, Artificial sequence
  artificial DNA molecule for generation of DNA nanostructure
gtagattttcaggtttttacatcgtgaatacc

SEQ ID NO: 3403 - DNA, 45 bp, Artificial sequence
  artificial DNA molecule for generation of DNA nanostructure
ccagggtagtgccaagcttggggcgcgatttttctgattcgaggt

SEQ ID NO: 3404 - DNA, 47 bp, Artificial sequence
  artificial DNA molecule for generation of DNA nanostructure
atgtgctgagttttaacgctgaggatggaagggttagaagaaattgc

SEQ ID NO: 3405 - DNA, 42 bp, Artificial sequence
  artificial DNA molecule for generation of DNA nanostructure
agagagaataacataaaagagggtaaccagagccagctacaa

SEQ ID NO: 3406 - DNA, 40 bp, Artificial sequence
  artificial DNA molecule for generation of DNA nanostructure
agcgcattgcgtcatatctctgaatttaccgtcaaggcga

SEQ ID NO: 3407 - DNA, 38 bp, Artificial sequence
  artificial DNA molecule for generation of DNA nanostructure
tattcaacagtaatgtgtaggtaaatttttattcaaaa

SEQ ID NO: 3408 - DNA, 44 bp, Artificial sequence
  artificial DNA molecule for generation of DNA nanostructure
catcaaaagcgagtaacaacccgtcggtttttttctcattgcct

SEQ ID NO: 3409 - DNA, 39 bp, Artificial sequence
  artificial DNA molecule for generation of DNA nanostructure
gtttgaggcactccagaaatgtgaataattcgcgtctgg

SEQ ID NO: 3410 - DNA, 56 bp, Artificial sequence
  artificial DNA molecule for generation of DNA nanostructure
ccatcgccgacagcatgaaagaggaccctcagatcagttgatacataattaccaga

SEQ ID NO: 3411 - DNA, 37 bp, Artificial sequence
  artificial DNA molecule for generation of DNA nanostructure
ctggcatgattaaaatcattacgttttagtggtttga

SEQ ID NO: 3412 - DNA, 42 bp, Artificial sequence
  artificial DNA molecule for generation of DNA nanostructure
agacaaaaaagtcaacagggaatttatcgatacagattctga

SEQ ID NO: 3413 - DNA, 40 bp, Artificial sequence
  artificial DNA molecule for generation of DNA nanostructure
gaactaacggaacaacttagactgccagagggggtaatag

SEQ ID NO: 3414 - DNA, 40 bp, Artificial sequence
  artificial DNA molecule for generation of DNA nanostructure
acgttgggaagaaaaagtcataaacctttaatgaggcttt

SEQ ID NO: 3415 - DNA, 46 bp, Artificial sequence
  artificial DNA molecule for generation of DNA nanostructure
gaagatcgggacgacggtaatgggataggtcacgttggtcaacatt

SEQ ID NO: 3416 - DNA, 45 bp, Artificial sequence
  artificial DNA molecule for generation of DNA nanostructure
cgcaactgtttttgttatttaaattgtaaacttaagttaaggggg

SEQ ID NO: 3417 - DNA, 39 bp, Artificial sequence
  artificial DNA molecule for generation of DNA nanostructure
aaatcggttcgccatacagatgataatgcagagatttag

SEQ ID NO: 3418 - DNA, 43 bp, Artificial sequence
  artificial DNA molecule for generation of DNA nanostructure
gggtgagattgtaccaaaatttttcattatgacccttaaagct

SEQ ID NO: 3419 - DNA, 38 bp, Artificial sequence
  artificial DNA molecule for generation of DNA nanostructure
ccgaagccacatcgtaaccgtgcatctgccaggtatta

SEQ ID NO: 3420 - DNA, 39 bp, Artificial sequence
  artificial DNA molecule for generation of DNA nanostructure
ccagctttccggttaagcaacacaaccaagtatcattcc

SEQ ID NO: 3421 - DNA, 47 bp, Artificial sequence
  artificial DNA molecule for generation of DNA nanostructure
ggaacgcaagcgccaggcctcagcgacgataaagttttggatagcgt

SEQ ID NO: 3422 - DNA, 65 bp, Artificial sequence
  artificial DNA molecule for generation of DNA nanostructure
gcagtagagtaggtagagattaggcaacatttgatcctcattaaaggtgatggcaggaggttgag

SEQ ID NO: 3423 - DNA, 76 bp, Artificial sequence
  artificial DNA molecule for generation of DNA nanostructure
gcagtagagtaggtagagattaggcacgccacccaaattggccttgatatgaatggatttttagcgcagcatggct

SEQ ID NO: 3424 - DNA, 65 bp, Artificial sequence
  artificial DNA molecule for generation of DNA nanostructure
gcagtagagtaggtagagattaggcatcacgacgcactaacatttgacgcgcacaaatcaacagt

SEQ ID NO: 3425 - DNA, 58 bp, Artificial sequence
  artificial DNA molecule for generation of DNA nanostructure
gcagtagagtaggtagagattaggcaaacaactaaaggaattatgccactgcgtagat

SEQ ID NO: 3426 - DNA, 62 bp, Artificial sequence
  artificial DNA molecule for generation of DNA nanostructure
gcagtagagtaggtagagattaggcagcccaaatgaataaacagcgctttctccgtggtgaa

SEQ ID NO: 3427 - DNA, 56 bp, Artificial sequence
  artificial DNA molecule for generation of DNA nanostructure
gcagtagagtaggtagagattaggcattttaacgtcaaatttttatgacaggcgga

SEQ ID NO: 3428 - DNA, 58 bp, Artificial sequence
  artificial DNA molecule for generation of DNA nanostructure
gcagtagagtaggtagagattaggcagagtaacaaaacgccagctggcgagggtaacg

SEQ ID NO: 3429 - DNA, 58 bp, Artificial sequence
  artificial DNA molecule for generation of DNA nanostructure
gcagtagagtaggtagagattaggcaaacatgaaagtattaatcaatataaataagaa

SEQ ID NO: 3430 - DNA, 39 bp, Artificial sequence
  artificial DNA molecule for generation of DNA nanostructure
acatttgatcctcattaaaggtgatggcaggaggttgag

SEQ ID NO: 3431 - DNA, 50 bp, Artificial sequence
  artificial DNA molecule for generation of DNA nanostructure
cgccacccaaattggccttgatatgaatggatttttagcgcagcatggct

SEQ ID NO: 3432 - DNA, 39 bp, Artificial sequence
  artificial DNA molecule for generation of DNA nanostructure
tcacgacgcactaacatttgacgcgcacaaatcaacagt

SEQ ID NO: 3433 - DNA, 32 bp, Artificial sequence
  artificial DNA molecule for generation of DNA nanostructure
aacaactaaaggaattatgccactgcgtagat

SEQ ID NO: 3434 - DNA, 36 bp, Artificial sequence
  artificial DNA molecule for generation of DNA nanostructure
gcccaaatgaataaacagcgctttctccgtggtgaa

SEQ ID NO: 3435 - DNA, 30 bp, Artificial sequence
  artificial DNA molecule for generation of DNA nanostructure
ttttaacgtcaaatttttatgacaggcgga

SEQ ID NO: 3436 - DNA, 32 bp, Artificial sequence
  artificial DNA molecule for generation of DNA nanostructure
gagtaacaaaacgccagctggcgagggtaacg

SEQ ID NO: 3437 - DNA, 32 bp, Artificial sequence
  artificial DNA molecule for generation of DNA nanostructure
aacatgaaagtattaatcaatataaataagaa

SEQ ID NO: 3438 - DNA, 45 bp, Artificial sequence
  artificial DNA molecule for generation of DNA nanostructure
accgtcggtggtgccatcccattccagtcaccagtgagacgggca

SEQ ID NO: 3439 - DNA, 45 bp, Artificial sequence
  artificial DNA molecule for generation of DNA nanostructure
tttagagcggagcgggagaacgtgatagggtttgccaacggcagc

SEQ ID NO: 3440 - DNA, 53 bp, Artificial sequence
  artificial DNA molecule for generation of DNA nanostructure
gcagtagagtaggtagagattaggcaataggaacccatgtacgacataaaaaa

SEQ ID NO: 3441 - DNA, 27 bp, Artificial sequence
  artificial DNA molecule for generation of DNA nanostructure
ataggaacccatgtacgacataaaaaa

SEQ ID NO: 3442 - DNA, 43 bp, Artificial sequence
  artificial DNA molecule for generation of DNA nanostructure
accgtactaaagaaactttaacaatttcatttgaattgagtaa

SEQ ID NO: 3443 - DNA, 61 bp, Artificial sequence
  artificial DNA molecule for generation of DNA nanostructure
cagactgtagcgcgttagagccacataacggaaataagagaggcagagtagaaaaagcctg

SEQ ID NO: 3444 - DNA, 43 bp, Artificial sequence
  artificial DNA molecule for generation of DNA nanostructure
atcccgtaaaacgcaagaagagtgttgttgatggttcgttaga

SEQ ID NO: 3445 - DNA, 37 bp, Artificial sequence
  artificial DNA molecule for generation of DNA nanostructure
tttagtatcatataattaattaacaaaattaattaca

SEQ ID NO: 3446 - DNA, 27 bp, Artificial sequence
  artificial DNA molecule for generation of DNA nanostructure
cattatcatttgccaccctctcagaac

SEQ ID NO: 3447 - DNA, 37 bp, Artificial sequence
  artificial DNA molecule for generation of DNA nanostructure
tgggtaaaggttttgcgcgccgggatagcttaccagt

SEQ ID NO: 3448 - DNA, 48 bp, Artificial sequence
  artificial DNA molecule for generation of DNA nanostructure
caaatcgttaacggcaacactggtgtaaattgaagaatacttagtttg

SEQ ID NO: 3449 - DNA, 49 bp, Artificial sequence
  artificial DNA molecule for generation of DNA nanostructure
aacaaagtacaacggaattataccagaggcaacagacgatcactttaaa

SEQ ID NO: 3450 - DNA, 33 bp, Artificial sequence
  artificial DNA molecule for generation of DNA nanostructure
actaaaacgggtaatcatcgcctgataaattgt

SEQ ID NO: 3451 - DNA, 43 bp, Artificial sequence
  artificial DNA molecule for generation of DNA nanostructure
gtcgaaattcatctttgacccccagcggatttgtaaatacgta

SEQ ID NO: 3452 - DNA, 36 bp, Artificial sequence
  artificial DNA molecule for generation of DNA nanostructure
gttttaaaatgctgatggtttacgagtagtgttcag

SEQ ID NO: 3453 - DNA, 45 bp, Artificial sequence
  artificial DNA molecule for generation of DNA nanostructure
ccagcgcaccggtgcccgggttacctgcagccctgcggctggtaa

SEQ ID NO: 3454 - DNA, 37 bp, Artificial sequence
  artificial DNA molecule for generation of DNA nanostructure
gggggttgccatgttctacctaaaacgaaaagcgcga

SEQ ID NO: 3455 - DNA, 37 bp, Artificial sequence
  artificial DNA molecule for generation of DNA nanostructure
aaacagaaataaacctaccatataaacagagtgcctt

SEQ ID NO: 3456 - DNA, 40 bp, Artificial sequence
  artificial DNA molecule for generation of DNA nanostructure
atccaatcctttttaagtaaatgctttttcaactttcctt

SEQ ID NO: 3457 - DNA, 47 bp, Artificial sequence
  artificial DNA molecule for generation of DNA nanostructure
ggttatataactatatcctccggcaggtctgaaagttacaccagtta

SEQ ID NO: 3458 - DNA, 36 bp, Artificial sequence
  artificial DNA molecule for generation of DNA nanostructure
attgcttggagaaacaataacggttatttgcacgta

SEQ ID NO: 3459 - DNA, 36 bp, Artificial sequence
  artificial DNA molecule for generation of DNA nanostructure
acaagcatttgaagtagttaaaaatcatttaggttg

SEQ ID NO: 3460 - DNA, 37 bp, Artificial sequence
  artificial DNA molecule for generation of DNA nanostructure
tgcaccctaatttgaaatcgcttgtttggatgaatat

SEQ ID NO: 3461 - DNA, 40 bp, Artificial sequence
  artificial DNA molecule for generation of DNA nanostructure
acagtaacagtaccttaacgtcagattatactaacctatt

SEQ ID NO: 3462 - DNA, 30 bp, Artificial sequence
  artificial DNA molecule for generation of DNA nanostructure
tatcataaggacgcgagaaaactgatgcaa

SEQ ID NO: 3463 - DNA, 50 bp, Artificial sequence
  artificial DNA molecule for generation of DNA nanostructure
tttttaccgtcggtggtgccatcccattccagtcaccagtgagacgggca

SEQ ID NO: 3464 - DNA, 32 bp, Artificial sequence
  artificial DNA molecule for generation of DNA nanostructure
tttttcattatcatttgccaccctctcagaac

SEQ ID NO: 3465 - DNA, 58 bp, Artificial sequence
  artificial DNA molecule for generation of DNA nanostructure
gcagtagagtaggtagagattaggcaataggaacccatgtacgacataaaaaattttt

SEQ ID NO: 3466 - DNA, 66 bp, Artificial sequence
  artificial DNA molecule for generation of DNA nanostructure
cagactgtagcgcgttagagccacataacggaaataagagaggcagagtagaaaaagcctgttttt

SEQ ID NO: 3467 - DNA, 42 bp, Artificial sequence
  artificial DNA molecule for generation of DNA nanostructure
ttttttttagtatcatataattaattaacaaaattaattaca

SEQ ID NO: 3468 - DNA, 48 bp, Artificial sequence
  artificial DNA molecule for generation of DNA nanostructure
tttttatcccgtaaaacgcaagaagagtgttgttgatggttcgttaga

SEQ ID NO: 3469 - DNA, 48 bp, Artificial sequence
  artificial DNA molecule for generation of DNA nanostructure
accgtactaaagaaactttaacaatttcatttgaattgagtaattttt

SEQ ID NO: 3470 - DNA, 50 bp, Artificial sequence
  artificial DNA molecule for generation of DNA nanostructure
tttagagcggagcgggagaacgtgatagggtttgccaacggcagcttttt

SEQ ID NO: 3471 - DNA, 42 bp, Artificial sequence
  artificial DNA molecule for generation of DNA nanostructure
ttttttgggtaaaggttttgcgcgccgggatagcttaccagt

SEQ ID NO: 3472 - DNA, 48 bp, Artificial sequence
  artificial DNA molecule for generation of DNA nanostructure
tttttgtcgaaattcatctttgacccccagcggatttgtaaatacgta

SEQ ID NO: 3473 - DNA, 50 bp, Artificial sequence
  artificial DNA molecule for generation of DNA nanostructure
ccagcgcaccggtgcccgggttacctgcagccctgcggctggtaattttt

SEQ ID NO: 3474 - DNA, 41 bp, Artificial sequence
  artificial DNA molecule for generation of DNA nanostructure
gttttaaaatgctgatggtttacgagtagtgttcagttttt

SEQ ID NO: 3475 - DNA, 42 bp, Artificial sequence
  artificial DNA molecule for generation of DNA nanostructure
gggggttgccatgttctacctaaaacgaaaagcgcgattttt

SEQ ID NO: 3476 - DNA, 53 bp, Artificial sequence
  artificial DNA molecule for generation of DNA nanostructure
tttttcaaatcgttaacggcaacactggtgtaaattgaagaatacttagtttg

SEQ ID NO: 3477 - DNA, 38 bp, Artificial sequence
  artificial DNA molecule for generation of DNA nanostructure
actaaaacgggtaatcatcgcctgataaattgtttttt

SEQ ID NO: 3478 - DNA, 54 bp, Artificial sequence
  artificial DNA molecule for generation of DNA nanostructure
tttttaacaaagtacaacggaattataccagaggcaacagacgatcactttaaa

SEQ ID NO: 3479 - DNA, 45 bp, Artificial sequence
  artificial DNA molecule for generation of DNA nanostructure
tttttacagtaacagtaccttaacgtcagattatactaacctatt

SEQ ID NO: 3480 - DNA, 41 bp, Artificial sequence
  artificial DNA molecule for generation of DNA nanostructure
attgcttggagaaacaataacggttatttgcacgtattttt

SEQ ID NO: 3481 - DNA, 42 bp, Artificial sequence
  artificial DNA molecule for generation of DNA nanostructure
tgcaccctaatttgaaatcgcttgtttggatgaatatttttt

SEQ ID NO: 3482 - DNA, 35 bp, Artificial sequence
  artificial DNA molecule for generation of DNA nanostructure
tatcataaggacgcgagaaaactgatgcaattttt

SEQ ID NO: 3483 - DNA, 41 bp, Artificial sequence
  artificial DNA molecule for generation of DNA nanostructure
acaagcatttgaagtagttaaaaatcatttaggttgttttt

SEQ ID NO: 3484 - DNA, 42 bp, Artificial sequence
  artificial DNA molecule for generation of DNA nanostructure
tttttaaacagaaataaacctaccatataaacagagtgcctt

SEQ ID NO: 3485 - DNA, 45 bp, Artificial sequence
  artificial DNA molecule for generation of DNA nanostructure
tttttatccaatcctttttaagtaaatgctttttcaactttcctt

SEQ ID NO: 3486 - DNA, 52 bp, Artificial sequence
  artificial DNA molecule for generation of DNA nanostructure
tttttggttatataactatatcctccggcaggtctgaaagttacaccagtta

SEQ ID NO: 3487 - DNA, 49 bp, Artificial sequence
  artificial DNA molecule for generation of DNA nanostructure
ctttaccctgactaaagattagaaccagagagtacgagtagaggtcaat

SEQ ID NO: 3488 - DNA, 42 bp, Artificial sequence
  artificial DNA molecule for generation of DNA nanostructure
accataaatcaaaaagacttcaaatacgtttaccagagaatg

SEQ ID NO: 3489 - DNA, 49 bp, Artificial sequence
  artificial DNA molecule for generation of DNA nanostructure
aatccccctcaaatagcgagattacgaggctgaatcaactaagtgaatt

SEQ ID NO: 3490 - DNA, 42 bp, Artificial sequence
  artificial DNA molecule for generation of DNA nanostructure
agaggaagcccgaaatcaggttgattgcgggagagctcacat

SEQ ID NO: 3491 - DNA, 49 bp, Artificial sequence
  artificial DNA molecule for generation of DNA nanostructure
gacgacgacactatcggatggaagtttcctgaaaaggtggttaatcatt

SEQ ID NO: 3492 - DNA, 49 bp, Artificial sequence
  artificial DNA molecule for generation of DNA nanostructure
ataaaaaccaaaatgctttaaggtgaatgacctgtcgtgccagctgcat

SEQ ID NO: 3493 - DNA, 49 bp, Artificial sequence
  artificial DNA molecule for generation of DNA nanostructure
gccagagggggtaaactgcggaatcgtcataaataaagttttgatacat

SEQ ID NO: 3494 - DNA, 35 bp, Artificial sequence
  artificial DNA molecule for generation of DNA nanostructure
cttcgcgttttaattttgatattgattctattttc

SEQ ID NO: 3495 - DNA, 42 bp, Artificial sequence
  artificial DNA molecule for generation of DNA nanostructure
aaaggaaggcttttgcaaaagttcattgacttgagaaggccg

SEQ ID NO: 3496 - DNA, 35 bp, Artificial sequence
  artificial DNA molecule for generation of DNA nanostructure
agaggtcatttttgcataaccttaattattcaacc

SEQ ID NO: 3497 - DNA, 42 bp, Artificial sequence
  artificial DNA molecule for generation of DNA nanostructure
ataatgctgtagctaacgccaggaaacaaaattcaaggtggc

SEQ ID NO: 3498 - DNA, 35 bp, Artificial sequence
  artificial DNA molecule for generation of DNA nanostructure
cacaacattattacaggtagaattcaactaatgca

SEQ ID NO: 3499 - DNA, 35 bp, Artificial sequence
  artificial DNA molecule for generation of DNA nanostructure
attccattttcaggcttttacatcgggaaacaaaa

SEQ ID NO: 3500 - DNA, 35 bp, Artificial sequence
  artificial DNA molecule for generation of DNA nanostructure
agtacggaagaatccttgaaatacctttatatttt

SEQ ID NO: 3501 - DNA, 35 bp, Artificial sequence
  artificial DNA molecule for generation of DNA nanostructure
atgttttgatagctcgtcgctattaattttttaat

SEQ ID NO: 3502 - DNA, 49 bp, Artificial sequence
  artificial DNA molecule for generation of DNA nanostructure
tggctcattataccataaaacgaactaacggaaactaagaacagtagta

SEQ ID NO: 3503 - DNA, 49 bp, Artificial sequence
  artificial DNA molecule for generation of DNA nanostructure
ccaataatttgcaaatccaatattaattgtcaatataacaacgataatc

SEQ ID NO: 3504 - DNA, 49 bp, Artificial sequence
  artificial DNA molecule for generation of DNA nanostructure
ttaacatgttgtacaaggccgttttgaggagtctggagcaaacccggtt

SEQ ID NO: 3505 - DNA, 28 bp, Artificial sequence
  artificial DNA molecule for generation of DNA nanostructure
atttcaattcaaatttaacctccggctt

SEQ ID NO: 3506 - DNA, 42 bp, Artificial sequence
  artificial DNA molecule for generation of DNA nanostructure
tggtttagaagcctaatgcctgtacagaaagggaaccgaact

SEQ ID NO: 3507 - DNA, 42 bp, Artificial sequence
  artificial DNA molecule for generation of DNA nanostructure
ccctgtataaagattaaagaggacagatgaacggtgagtaat

SEQ ID NO: 3508 - DNA, 35 bp, Artificial sequence
  artificial DNA molecule for generation of DNA nanostructure
ggataaaaatttaacaaagctgaaacaccagaacg

SEQ ID NO: 3509 - DNA, 35 bp, Artificial sequence
  artificial DNA molecule for generation of DNA nanostructure
agatctacaaaggctcaaaagcatttgatttgccc

SEQ ID NO: 3510 - DNA, 35 bp, Artificial sequence
  artificial DNA molecule for generation of DNA nanostructure
tggctgagaggcgcagacggtaaacgttcttacca

SEQ ID NO: 3511 - DNA, 42 bp, Artificial sequence
  artificial DNA molecule for generation of DNA nanostructure
caagagagagagggtagctatgagacagtagagccttaaaag

SEQ ID NO: 3512 - DNA, 35 bp, Artificial sequence
  artificial DNA molecule for generation of DNA nanostructure
caatcatccaggcgcataggctatatttgaatcat

SEQ ID NO: 3513 - DNA, 42 bp, Artificial sequence
  artificial DNA molecule for generation of DNA nanostructure
ccggaacccttcatcaagagtaatcaacgtttagaaccctca

SEQ ID NO: 3514 - DNA, 42 bp, Artificial sequence
  artificial DNA molecule for generation of DNA nanostructure
agattgtgaccaactttgatcaggtcatccccaaaagaatcg

SEQ ID NO: 3515 - DNA, 42 bp, Artificial sequence
  artificial DNA molecule for generation of DNA nanostructure
ataagcactcaacaaataagacgaaccaaaacatcctgtctt

SEQ ID NO: 3516 - DNA, 49 bp, Artificial sequence
  artificial DNA molecule for generation of DNA nanostructure
gaacgccatcaaaagcgagtatgccagtttccggcgcaactggggggat

SEQ ID NO: 3517 - DNA, 49 bp, Artificial sequence
  artificial DNA molecule for generation of DNA nanostructure
gcattaaatttttggattgaccgtaaaaggcaccaaaaattcaaattgt

SEQ ID NO: 3518 - DNA, 35 bp, Artificial sequence
  artificial DNA molecule for generation of DNA nanostructure
aacaaagtacaatattttgttacctaaaacgtaat

SEQ ID NO: 3519 - DNA, 56 bp, Artificial sequence
  artificial DNA molecule for generation of DNA nanostructure
tataccaagcgcgaagaatactttccatacggctaaatgacacgaggtgttgtatc

SEQ ID NO: 3520 - DNA, 42 bp, Artificial sequence
  artificial DNA molecule for generation of DNA nanostructure
tctccgtggcgcatcggaaaccaggcgagttaaagcgttggt

SEQ ID NO: 3521 - DNA, 35 bp, Artificial sequence
  artificial DNA molecule for generation of DNA nanostructure
ttgagggatatcaaaccctcaattaacattgaatg

SEQ ID NO: 3522 - DNA, 42 bp, Artificial sequence
  artificial DNA molecule for generation of DNA nanostructure
gtgcatcacaacccgtcggatccaatagagaaaagtgcctga

SEQ ID NO: 3523 - DNA, 35 bp, Artificial sequence
  artificial DNA molecule for generation of DNA nanostructure
cgtgggataggtcagccgcttcgctgagttttccc

SEQ ID NO: 3524 - DNA, 35 bp, Artificial sequence
  artificial DNA molecule for generation of DNA nanostructure
ttgcgggatcgtacgccactaaagtaccgtataaa

SEQ ID NO: 3525 - DNA, 49 bp, Artificial sequence
  artificial DNA molecule for generation of DNA nanostructure
agcatcgcgcataaaaaacgacggccgcttgctttacaaccatcgccca

SEQ ID NO: 3526 - DNA, 42 bp, Artificial sequence
  artificial DNA molecule for generation of DNA nanostructure
gaacgagggtagcataaacgggtaaaatacgaaagaggcaaa

SEQ ID NO: 3527 - DNA, 42 bp, Artificial sequence
  artificial DNA molecule for generation of DNA nanostructure
aggctgcaccgcttctggtgccgtaaccatttaggccatatt

SEQ ID NO: 3528 - DNA, 35 bp, Artificial sequence
  artificial DNA molecule for generation of DNA nanostructure
gccattcgtctttagtgaggcggtcagtacatgta

SEQ ID NO: 3529 - DNA, 49 bp, Artificial sequence
  artificial DNA molecule for generation of DNA nanostructure
ggaaagcgccattcttaagttaccggaaagcagtttcagcggagtgaga

SEQ ID NO: 3530 - DNA, 35 bp, Artificial sequence
  artificial DNA molecule for generation of DNA nanostructure
ccgatataagtttatcaacaatagaaaccatcgta

SEQ ID NO: 3531 - DNA, 35 bp, Artificial sequence
  artificial DNA molecule for generation of DNA nanostructure
gggtaacgccaggggcttgcaagccctaccagcag

SEQ ID NO: 3532 - DNA, 42 bp, Artificial sequence
  artificial DNA molecule for generation of DNA nanostructure
gtacagcagggatagatcaaaataaaaaggcaaacgcggtcc

SEQ ID NO: 3533 - DNA, 42 bp, Artificial sequence
  artificial DNA molecule for generation of DNA nanostructure
acaatcgacaaaccaagtaccgccttgcctgagtacaaaata

SEQ ID NO: 3534 - DNA, 42 bp, Artificial sequence
  artificial DNA molecule for generation of DNA nanostructure
gccacgggaacggatcgagaatccttatcattccaaactgat

SEQ ID NO: 3535 - DNA, 42 bp, Artificial sequence
  artificial DNA molecule for generation of DNA nanostructure
atagaaaatgggattgcgtaacactgagtttcgtcaatgaat

SEQ ID NO: 3536 - DNA, 42 bp, Artificial sequence
  artificial DNA molecule for generation of DNA nanostructure
aattgcggttagtaaccagtaagcaagcccaatagtcagcag

SEQ ID NO: 3537 - DNA, 49 bp, Artificial sequence
  artificial DNA molecule for generation of DNA nanostructure
cacgttgagttttgtgtagcaaccaccctcatttttcagaaccgccacc

SEQ ID NO: 3538 - DNA, 42 bp, Artificial sequence
  artificial DNA molecule for generation of DNA nanostructure
tccagacaataataattttttggtttatcaagtgccaagctt

SEQ ID NO: 3539 - DNA, 35 bp, Artificial sequence
  artificial DNA molecule for generation of DNA nanostructure
ttgtgtacatcgaccttaaatttctttgtaccgcc

SEQ ID NO: 3540 - DNA, 42 bp, Artificial sequence
  artificial DNA molecule for generation of DNA nanostructure
ccgttccaatcccgtaaaaaaacgcagacacttgctggtaat

SEQ ID NO: 3541 - DNA, 35 bp, Artificial sequence
  artificial DNA molecule for generation of DNA nanostructure
cagggatcaaactacaacgcctcgtctttagttgc

SEQ ID NO: 3542 - DNA, 42 bp, Artificial sequence
  artificial DNA molecule for generation of DNA nanostructure
cagagcagtgttttgaacggtacgtgctctagggcagagctt

SEQ ID NO: 3543 - DNA, 49 bp, Artificial sequence
  artificial DNA molecule for generation of DNA nanostructure
cggacttcatcccacgcaacctggagactcctcaagagaagggtggtgc

SEQ ID NO: 3544 - DNA, 49 bp, Artificial sequence
  artificial DNA molecule for generation of DNA nanostructure
gtagaacaaagttacaggcggcctttagtttgctatcctcccgacttgc

SEQ ID NO: 3545 - DNA, 42 bp, Artificial sequence
  artificial DNA molecule for generation of DNA nanostructure
gtcagcgtaatttgattttttgctacagccacacctttaaga

SEQ ID NO: 3546 - DNA, 42 bp, Artificial sequence
  artificial DNA molecule for generation of DNA nanostructure
ggctggaggtgtccactcaatactgttggctcgtctgccggt

SEQ ID NO: 3547 - DNA, 49 bp, Artificial sequence
  artificial DNA molecule for generation of DNA nanostructure
gtgtatcaccgtacgccgtcgataaacagtaataaattaaagcaggtca

SEQ ID NO: 3548 - DNA, 49 bp, Artificial sequence
  artificial DNA molecule for generation of DNA nanostructure
ttagcggggttttgatgccaaggtctgggaacccatgtacatgaagggt

SEQ ID NO: 3549 - DNA, 49 bp, Artificial sequence
  artificial DNA molecule for generation of DNA nanostructure
ccaggcggataagttcaggaggtttaaccgcaagactcagtacctattt

SEQ ID NO: 3550 - DNA, 49 bp, Artificial sequence
  artificial DNA molecule for generation of DNA nanostructure
ataaacatcccttagtatgagaaatttatcccaatttgctttcggtcac

SEQ ID NO: 3551 - DNA, 35 bp, Artificial sequence
  artificial DNA molecule for generation of DNA nanostructure
gtaagcgtcatacatggctttcggaaccgtcaaaa

SEQ ID NO: 3552 - DNA, 42 bp, Artificial sequence
  artificial DNA molecule for generation of DNA nanostructure
tgatgatgcagtctaccgggggtttcaggttgaggccagaat

SEQ ID NO: 3553 - DNA, 42 bp, Artificial sequence
  artificial DNA molecule for generation of DNA nanostructure
acaggagtgtactggttaatgctttacaatcttactcaagat

SEQ ID NO: 3554 - DNA, 42 bp, Artificial sequence
  artificial DNA molecule for generation of DNA nanostructure
cgggttatggtgcttgaggattcccagagccaccaccggaac

SEQ ID NO: 3555 - DNA, 42 bp, Artificial sequence
  artificial DNA molecule for generation of DNA nanostructure
cagatgcgtgttcagcaaatcatgaaagagaaacgccagtta

SEQ ID NO: 3556 - DNA, 49 bp, Artificial sequence
  artificial DNA molecule for generation of DNA nanostructure
actgcgcctcgaataaattgtcggaagcgagctaagcggtttgcgtatt

SEQ ID NO: 3557 - DNA, 35 bp, Artificial sequence
  artificial DNA molecule for generation of DNA nanostructure
gcggccagaatgcgacggcatgtaaccaggcgcgt

SEQ ID NO: 3558 - DNA, 35 bp, Artificial sequence
  artificial DNA molecule for generation of DNA nanostructure
agcctccttaccagaaagtaagcagatagctgcgc

SEQ ID NO: 3559 - DNA, 28 bp, Artificial sequence
  artificial DNA molecule for generation of DNA nanostructure
tgcctgtaacgcaattaccgaagccctt

SEQ ID NO: 3560 - DNA, 42 bp, Artificial sequence
  artificial DNA molecule for generation of DNA nanostructure
cgccagcagccacccatcggccgacagaccattaccattagc

SEQ ID NO: 3561 - DNA, 28 bp, Artificial sequence
  artificial DNA molecule for generation of DNA nanostructure
tcttttcccagtcgggaaaaaccatcga

SEQ ID NO: 3562 - DNA, 35 bp, Artificial sequence
  artificial DNA molecule for generation of DNA nanostructure
attagcgggttgagtgttgaatatggttgtcaccg

SEQ ID NO: 3563 - DNA, 42 bp, Artificial sequence
  artificial DNA molecule for generation of DNA nanostructure
ccccctttagcagcgaaacgtcaccaattatcacctaccagc

SEQ ID NO: 3564 - DNA, 28 bp, Artificial sequence
  artificial DNA molecule for generation of DNA nanostructure
gtcatagaccgccaccctcagattgaca

SEQ ID NO: 3565 - DNA, 35 bp, Artificial sequence
  artificial DNA molecule for generation of DNA nanostructure
taattgccacaacatcggcaagtcaaagggcgaaa

SEQ ID NO: 3566 - DNA, 49 bp, Artificial sequence
  artificial DNA molecule for generation of DNA nanostructure
gttgcgctcggccaacgcgcgccgaaggtaaatattgacggataatgaa

SEQ ID NO: 3567 - DNA, 35 bp, Artificial sequence
  artificial DNA molecule for generation of DNA nanostructure
tcactgcccgctttataatcaaaatcaccggaaca

SEQ ID NO: 3568 - DNA, 28 bp, Artificial sequence
  artificial DNA molecule for generation of DNA nanostructure
accgtaatcagtagattttcgaacatat

SEQ ID NO: 3569 - DNA, 42 bp, Artificial sequence
  artificial DNA molecule for generation of DNA nanostructure
agacggggagagagaagaagagattgcttgcacgtaatcctg

SEQ ID NO: 3570 - DNA, 42 bp, Artificial sequence
  artificial DNA molecule for generation of DNA nanostructure
aattattggcgacacatttaaacagtactttaacgaggttgg

SEQ ID NO: 3571 - DNA, 42 bp, Artificial sequence
  artificial DNA molecule for generation of DNA nanostructure
ccatttgcaatagagtacatatgtaaattagattaaaaatca

SEQ ID NO: 3572 - DNA, 35 bp, Artificial sequence
  artificial DNA molecule for generation of DNA nanostructure
ttgcagcaaaatcctgtttgatatcagggcgatgg

SEQ ID NO: 3573 - DNA, 35 bp, Artificial sequence
  artificial DNA molecule for generation of DNA nanostructure
tccgaaatacgagctatccgctcacaatccccggg

SEQ ID NO: 3574 - DNA, 42 bp, Artificial sequence
  artificial DNA molecule for generation of DNA nanostructure
tataaatcaaaagattaaagaacgtggaaacaaagtcacagt

SEQ ID NO: 3575 - DNA, 42 bp, Artificial sequence
  artificial DNA molecule for generation of DNA nanostructure
tagaaaatacatacggaatacggtgccagcacgcgcctcaga

SEQ ID NO: 3576 - DNA, 42 bp, Artificial sequence
  artificial DNA molecule for generation of DNA nanostructure
ttttggggtcgagggacggggaaagccggaaaggagcgggcg

SEQ ID NO: 3577 - DNA, 35 bp, Artificial sequence
  artificial DNA molecule for generation of DNA nanostructure
tgccgtaaaccgtctggtggttggccctcaacagc

SEQ ID NO: 3578 - DNA, 49 bp, Artificial sequence
  artificial DNA molecule for generation of DNA nanostructure
aagcacttaccgaggcctgtgcactctgcctgcagagtgtaggacgagc

SEQ ID NO: 3579 - DNA, 49 bp, Artificial sequence
  artificial DNA molecule for generation of DNA nanostructure
aaatcggaaccccgctccaacaatccctgattgagggaggttcaccgcc

SEQ ID NO: 3580 - DNA, 49 bp, Artificial sequence
  artificial DNA molecule for generation of DNA nanostructure
aaggaaatccactaatagcccacaaaagcattaaaacagttcagaaaac

SEQ ID NO: 3581 - DNA, 35 bp, Artificial sequence
  artificial DNA molecule for generation of DNA nanostructure
ccgaggatcttcgcgttttcacggtcatctgaatt

SEQ ID NO: 3582 - DNA, 35 bp, Artificial sequence
  artificial DNA molecule for generation of DNA nanostructure
ccaaaagaatgaaatagcaatctaatatggaaagc

SEQ ID NO: 3583 - DNA, 35 bp, Artificial sequence
  artificial DNA molecule for generation of DNA nanostructure
gctaaagggagcccccgatttgctggcaccagcgg

SEQ ID NO: 3584 - DNA, 42 bp, Artificial sequence
  artificial DNA molecule for generation of DNA nanostructure
cgccgcgtaccgttccagttagcgggccgtccgtgcgcctcc

SEQ ID NO: 3585 - DNA, 49 bp, Artificial sequence
  artificial DNA molecule for generation of DNA nanostructure
ctggtaattgagcgagctatctaataacatttccagtttggaacaagag

SEQ ID NO: 3586 - DNA, 35 bp, Artificial sequence
  artificial DNA molecule for generation of DNA nanostructure
cagagagactgaacaccctgatagcagcccccctg

SEQ ID NO: 3587 - DNA, 35 bp, Artificial sequence
  artificial DNA molecule for generation of DNA nanostructure
ttcctcgttagaatgggattttagacagtataatc

SEQ ID NO: 3588 - DNA, 49 bp, Artificial sequence
  artificial DNA molecule for generation of DNA nanostructure
acgtataacgccagccgggtcccgccgggcgcggtagcttacataacgg

SEQ ID NO: 3589 - DNA, 35 bp, Artificial sequence
  artificial DNA molecule for generation of DNA nanostructure
actatggccaaatatattaagaggctcgcactggt

SEQ ID NO: 3590 - DNA, 42 bp, Artificial sequence
  artificial DNA molecule for generation of DNA nanostructure
agaattaataacccaagaaacaactggcgcaaacgaaaagaa

SEQ ID NO: 3591 - DNA, 42 bp, Artificial sequence
  artificial DNA molecule for generation of DNA nanostructure
aacagccatatttcataacataacagcggctctcacggaaaa

SEQ ID NO: 3592 - DNA, 42 bp, Artificial sequence
  artificial DNA molecule for generation of DNA nanostructure
cagagcctggtgctcggcagcaccgtcgattaggactgaaac

SEQ ID NO: 3593 - DNA, 42 bp, Artificial sequence
  artificial DNA molecule for generation of DNA nanostructure
gtctttcgggaggttttctgtggaacaactaaaggtcagagg

SEQ ID NO: 3594 - DNA, 49 bp, Artificial sequence
  artificial DNA molecule for generation of DNA nanostructure
aacgagcatgaaaaacaaagtcagagtaatgcgccgtttaactattatt

SEQ ID NO: 3595 - DNA, 35 bp, Artificial sequence
  artificial DNA molecule for generation of DNA nanostructure
gcaatacttctgcttttctccgtggtgagccatgt

SEQ ID NO: 3596 - DNA, 49 bp, Artificial sequence
  artificial DNA molecule for generation of DNA nanostructure
gaagaacaacaactttcaaagagccgcaaacgatgctgattgaacgtgc

SEQ ID NO: 3597 - DNA, 49 bp, Artificial sequence
  artificial DNA molecule for generation of DNA nanostructure
tttgaagtaagaacgcgaggcgccgttttggagccagtcacgacgttgt

SEQ ID NO: 3598 - DNA, 49 bp, Artificial sequence
  artificial DNA molecule for generation of DNA nanostructure
agccattgaaatggttaccaggccagctggcgaaattgggaaaatattt

SEQ ID NO: 3599 - DNA, 35 bp, Artificial sequence
  artificial DNA molecule for generation of DNA nanostructure
atccagacagattcgcgaaacgtgctgcaaggcga

SEQ ID NO: 3600 - DNA, 35 bp, Artificial sequence
  artificial DNA molecule for generation of DNA nanostructure
ggtattcccttaaacaacgctcagtaccgccaccc

SEQ ID NO: 3601 - DNA, 49 bp, Artificial sequence
  artificial DNA molecule for generation of DNA nanostructure
attatttaataaaagggacatcacagacgggcgatcactccagccagct

SEQ ID NO: 3602 - DNA, 42 bp, Artificial sequence
  artificial DNA molecule for generation of DNA nanostructure
caagcaagttttagcgaacaaactatcggcactcataacctc

SEQ ID NO: 3603 - DNA, 35 bp, Artificial sequence
  artificial DNA molecule for generation of DNA nanostructure
ttattttcaatcaataatcgggccattaattcggt

SEQ ID NO: 3604 - DNA, 42 bp, Artificial sequence
  artificial DNA molecule for generation of DNA nanostructure
gaccagtacattggacaatatattagtactgagaacatcctc

SEQ ID NO: 3605 - DNA, 42 bp, Artificial sequence
  artificial DNA molecule for generation of DNA nanostructure
aagataaattttcggtagatggggaacaaacggcgttaaatc

SEQ ID NO: 3606 - DNA, 42 bp, Artificial sequence
  artificial DNA molecule for generation of DNA nanostructure
ttgctgagccacgctacgtggtctggccatcgtctgcaacag

SEQ ID NO: 3607 - DNA, 49 bp, Artificial sequence
  artificial DNA molecule for generation of DNA nanostructure
cagaggcaacagagatgcgcgagaacgggtattcagtcacacgctatta

SEQ ID NO: 3608 - DNA, 42 bp, Artificial sequence
  artificial DNA molecule for generation of DNA nanostructure
agccagtgtagggcgaagtatgtgtaggatacttttgcggga

SEQ ID NO: 3609 - DNA, 35 bp, Artificial sequence
  artificial DNA molecule for generation of DNA nanostructure
gacaaaacagaacgcgcctaataccgaagaatata

SEQ ID NO: 3610 - DNA, 42 bp, Artificial sequence
  artificial DNA molecule for generation of DNA nanostructure
gccaatcaatatctaatagattcaaatcataaagctaaatcg

SEQ ID NO: 3611 - DNA, 35 bp, Artificial sequence
  artificial DNA molecule for generation of DNA nanostructure
gataataggtgagacaaaaacattatgataatagt

SEQ ID NO: 3612 - DNA, 28 bp, Artificial sequence
  artificial DNA molecule for generation of DNA nanostructure
tagactttacaatagccaacgaatattt

SEQ ID NO: 3613 - DNA, 35 bp, Artificial sequence
  artificial DNA molecule for generation of DNA nanostructure
aacaccgtaaatgcttatttcaacgcaaaattggg

SEQ ID NO: 3614 - DNA, 42 bp, Artificial sequence
  artificial DNA molecule for generation of DNA nanostructure
tcattttgcggaaccatattcctgattaattgtttggattat

SEQ ID NO: 3615 - DNA, 42 bp, Artificial sequence
  artificial DNA molecule for generation of DNA nanostructure
tttgagtatggcaaatcatacaacctgtttagctaccaattc

SEQ ID NO: 3616 - DNA, 35 bp, Artificial sequence
  artificial DNA molecule for generation of DNA nanostructure
gaacgttcgcaagaagtagcaatttggggcgcgag

SEQ ID NO: 3617 - DNA, 42 bp, Artificial sequence
  artificial DNA molecule for generation of DNA nanostructure
aaacaattcgacaactcgtataaactttctcatcaattctac

SEQ ID NO: 3618 - DNA, 42 bp, Artificial sequence
  artificial DNA molecule for generation of DNA nanostructure
aggcgttaaataagagttaatcttgagaaccttatgcgattt

SEQ ID NO: 3619 - DNA, 35 bp, Artificial sequence
  artificial DNA molecule for generation of DNA nanostructure
tcagatgaacattaaacaactggtcagttggcaaa

SEQ ID NO: 3620 - DNA, 35 bp, Artificial sequence
  artificial DNA molecule for generation of DNA nanostructure
caaagaagttatataactatacgtagatataacag

SEQ ID NO: 3621 - DNA, 49 bp, Artificial sequence
  artificial DNA molecule for generation of DNA nanostructure
cgcgagataaatccggatttattaattgaacaggaagctcattttttaa

SEQ ID NO: 3622 - DNA, 35 bp, Artificial sequence
  artificial DNA molecule for generation of DNA nanostructure
ttcatcttaggtctgagagacacatagcaaatatg

SEQ ID NO: 3623 - DNA, 42 bp, Artificial sequence
  artificial DNA molecule for generation of DNA nanostructure
tctgaccataaataaattactacaaattaacggagatttgta

SEQ ID NO: 3624 - DNA, 42 bp, Artificial sequence
  artificial DNA molecule for generation of DNA nanostructure
atatcaaaattattttgaataccaagttaattacctgagcaa

SEQ ID NO: 3625 - DNA, 35 bp, Artificial sequence
  artificial DNA molecule for generation of DNA nanostructure
aaaacagtgcgaacctttaattgctccttcgagct

SEQ ID NO: 3626 - DNA, 35 bp, Artificial sequence
  artificial DNA molecule for generation of DNA nanostructure
aaataaataacggattcgccttgatgaatcaaagc

SEQ ID NO: 3627 - DNA, 42 bp, Artificial sequence
  artificial DNA molecule for generation of DNA nanostructure
tcagatgtgtctggcttagagcttaattgcatagtaagagca

SEQ ID NO: 3628 - DNA, 49 bp, Artificial sequence
  artificial DNA molecule for generation of DNA nanostructure
acaaacatcaagaagaaacaagaaattgtgtaaatgctgacatcaatat

SEQ ID NO: 3629 - DNA, 42 bp, Artificial sequence
  artificial DNA molecule for generation of DNA nanostructure
atttgaagccaaaggagatagtttgccactcagagccgccac

SEQ ID NO: 3630 - DNA, 35 bp, Artificial sequence
  artificial DNA molecule for generation of DNA nanostructure
ttaccttaattttcccttatatacagtacaatttc

SEQ ID NO: 3631 - DNA, 42 bp, Artificial sequence
  artificial DNA molecule for generation of DNA nanostructure
tttttctggatagcgtccaattagtaaaatgtttagattttt

SEQ ID NO: 3632 - DNA, 42 bp, Artificial sequence
  artificial DNA molecule for generation of DNA nanostructure
tttttgatttaggaataccacaagattcatcagttgattttt

SEQ ID NO: 3633 - DNA, 42 bp, Artificial sequence
  artificial DNA molecule for generation of DNA nanostructure
tttttagaaaaatctacgttaagtcaggacgttgggattttt

SEQ ID NO: 3634 - DNA, 42 bp, Artificial sequence
  artificial DNA molecule for generation of DNA nanostructure
tttttaggcttgccctgacgagctcattcagtgaatattttt

SEQ ID NO: 3635 - DNA, 42 bp, Artificial sequence
  artificial DNA molecule for generation of DNA nanostructure
tttttggatattcattacccaaatcttgacaagaaccttttt

SEQ ID NO: 3636 - DNA, 45 bp, Artificial sequence
  artificial DNA molecule for generation of DNA nanostructure
ttttttccgcgacctgctccatgttacttagtcatcgcctgataa

SEQ ID NO: 3637 - DNA, 34 bp, Artificial sequence
  artificial DNA molecule for generation of DNA nanostructure
tttttacccccagcgatattgtgtcgaaattttt

SEQ ID NO: 3638 - DNA, 48 bp, Artificial sequence
  artificial DNA molecule for generation of DNA nanostructure
tttttagactttttcatgaggaagactaaaacactcatctttgttttt

SEQ ID NO: 3639 - DNA, 48 bp, Artificial sequence
  artificial DNA molecule for generation of DNA nanostructure
ttttttaccgatagttgcgccgaccagaggctttgaggactaattttt

SEQ ID NO: 3640 - DNA, 48 bp, Artificial sequence
  artificial DNA molecule for generation of DNA nanostructure
tttttctccaaaaggagcctttaaaatttcttaaacagcttgattttt

SEQ ID NO: 3641 - DNA, 48 bp, Artificial sequence
  artificial DNA molecule for generation of DNA nanostructure
tttttagttagcgtaacgatctaaaaaatctccaaaaaaaaggttttt

SEQ ID NO: 3642 - DNA, 41 bp, Artificial sequence
  artificial DNA molecule for generation of DNA nanostructure
tttttaccctcagagccttccacagacagccctcatttttt

SEQ ID NO: 3643 - DNA, 34 bp, Artificial sequence
  artificial DNA molecule for generation of DNA nanostructure
tttttagcccggaatagctcagaaccgccttttt

SEQ ID NO: 3644 - DNA, 48 bp, Artificial sequence
  artificial DNA molecule for generation of DNA nanostructure
tttttcttgagtaacagtgcccgtagagggttgatataagtatttttt

SEQ ID NO: 3645 - DNA, 48 bp, Artificial sequence
  artificial DNA molecule for generation of DNA nanostructure
tttttcacaaacaaataaatcctcgttttaacggggtcagtgcttttt

SEQ ID NO: 3646 - DNA, 48 bp, Artificial sequence
  artificial DNA molecule for generation of DNA nanostructure
tttttgaaccaccaccagagccgcgacgattggccttgatattttttt

SEQ ID NO: 3647 - DNA, 48 bp, Artificial sequence
  artificial DNA molecule for generation of DNA nanostructure
ttttttcagactgtagcgcgttttaccctcagagccgccaccattttt

SEQ ID NO: 3648 - DNA, 41 bp, Artificial sequence
  artificial DNA molecule for generation of DNA nanostructure
ttttttcaccagtagcaatcaagtttgcctttagcgttttt

SEQ ID NO: 3649 - DNA, 31 bp, Artificial sequence
  artificial DNA molecule for generation of DNA nanostructure
tcacaatggaattagagccagcaaaattttt

SEQ ID NO: 3650 - DNA, 42 bp, Artificial sequence
  artificial DNA molecule for generation of DNA nanostructure
tttttgaataagtttattttgacgcaaagacaccacgttttt

SEQ ID NO: 3651 - DNA, 42 bp, Artificial sequence
  artificial DNA molecule for generation of DNA nanostructure
tttttattacgcagtatgttaatgattaagactccttttttt

SEQ ID NO: 3652 - DNA, 42 bp, Artificial sequence
  artificial DNA molecule for generation of DNA nanostructure
tttttgcccaataataagagcacaagaattgagttaattttt

SEQ ID NO: 3653 - DNA, 42 bp, Artificial sequence
  artificial DNA molecule for generation of DNA nanostructure
tttttaagcgcattagacgggtaacataaaaacagggttttt

SEQ ID NO: 3654 - DNA, 31 bp, Artificial sequence
  artificial DNA molecule for generation of DNA nanostructure
tttttagctacaattttatcctgagagagaa

SEQ ID NO: 3655 - DNA, 45 bp, Artificial sequence
  artificial DNA molecule for generation of DNA nanostructure
tagaaggcttatccggaatcattaccgcgcccaatagcaattttt

SEQ ID NO: 3656 - DNA, 34 bp, Artificial sequence
  artificial DNA molecule for generation of DNA nanostructure
tttttgcaaatcagatatattttgcacccttttt

SEQ ID NO: 3657 - DNA, 45 bp, Artificial sequence
  artificial DNA molecule for generation of DNA nanostructure
tttttatatcccatcctaatttacgagcatgtagataagtcctga

SEQ ID NO: 3658 - DNA, 45 bp, Artificial sequence
  artificial DNA molecule for generation of DNA nanostructure
atgttcagctaatgggtaaagtaattctgtccagacgacgttttt

SEQ ID NO: 3659 - DNA, 34 bp, Artificial sequence
  artificial DNA molecule for generation of DNA nanostructure
tttttacaataaacaacacaagaaaaatattttt

SEQ ID NO: 3660 - DNA, 42 bp, Artificial sequence
  artificial DNA molecule for generation of DNA nanostructure
tttttgtatcatatgcgttatagaaaaagcctgtttattttt

SEQ ID NO: 3661 - DNA, 42 bp, Artificial sequence
  artificial DNA molecule for generation of DNA nanostructure
tttttaaataccgaccgtgtgtaaatttaatggtttgttttt

SEQ ID NO: 3662 - DNA, 42 bp, Artificial sequence
  artificial DNA molecule for generation of DNA nanostructure
tttttcaatagtgaatttatcagacgctgagaagagtttttt

SEQ ID NO: 3663 - DNA, 42 bp, Artificial sequence
  artificial DNA molecule for generation of DNA nanostructure
ttttttgaataaccttgcttcaatcaatatatgtgagttttt

SEQ ID NO: 3664 - DNA, 38 bp, Artificial sequence
  artificial DNA molecule for generation of DNA nanostructure
tttaacaggtcaggattagaccggaagcaaactccttt

SEQ ID NO: 3665 - DNA, 38 bp, Artificial sequence
  artificial DNA molecule for generation of DNA nanostructure
tttgatacatttcgcaaattttagtttgaccattattt

SEQ ID NO: 3666 - DNA, 50 bp, Artificial sequence
  artificial DNA molecule for generation of DNA nanostructure
aggcaagtcagagcaccatcaaatgccgatcgatgaacggtaatcgtttt

SEQ ID NO: 3667 - DNA, 38 bp, Artificial sequence
  artificial DNA molecule for generation of DNA nanostructure
tttttctagctgataaattatatgatattcaaccgttt

SEQ ID NO: 3668 - DNA, 44 bp, Artificial sequence
  artificial DNA molecule for generation of DNA nanostructure
tttaaaactagcatgtcaatcagcgtctggccttcctgtagttt

SEQ ID NO: 3669 - DNA, 30 bp, Artificial sequence
  artificial DNA molecule for generation of DNA nanostructure
ttttcaggaagatcgcggtgcgggcctttt

SEQ ID NO: 3670 - DNA, 30 bp, Artificial sequence
  artificial DNA molecule for generation of DNA nanostructure
ttttgagagatagaccatttgccgccattt

SEQ ID NO: 3671 - DNA, 27 bp, Artificial sequence
  artificial DNA molecule for generation of DNA nanostructure
tttgcagttgggcggcgtctcgtcttt

SEQ ID NO: 3672 - DNA, 26 bp, Artificial sequence
  artificial DNA molecule for generation of DNA nanostructure
tttgctggcagcctccggcgtttttt

SEQ ID NO: 3673 - DNA, 38 bp, Artificial sequence
  artificial DNA molecule for generation of DNA nanostructure
tttgggtaaaggtttctttccctgcggctggtaatttt

SEQ ID NO: 3674 - DNA, 38 bp, Artificial sequence
  artificial DNA molecule for generation of DNA nanostructure
tttgatccagcgcagtgtcgccccctgcatcagacttt

SEQ ID NO: 3675 - DNA, 38 bp, Artificial sequence
  artificial DNA molecule for generation of DNA nanostructure
tttggggtgcctaatgagtataaagtgtaaagcctttt

SEQ ID NO: 3676 - DNA, 38 bp, Artificial sequence
  artificial DNA molecule for generation of DNA nanostructure
ttttttcttttcaccagtggggcgccagggtggttttt

SEQ ID NO: 3677 - DNA, 38 bp, Artificial sequence
  artificial DNA molecule for generation of DNA nanostructure
ttttcacccaaatcaagttcccactacgtgaaccattt

SEQ ID NO: 3678 - DNA, 38 bp, Artificial sequence
  artificial DNA molecule for generation of DNA nanostructure
tttaggaagggaagaaagcgcgaacgtggcgagaattt

SEQ ID NO: 3679 - DNA, 36 bp, Artificial sequence
  artificial DNA molecule for generation of DNA nanostructure
cgttgtaagtgaggccaccgagtaaaagagtctttt

SEQ ID NO: 3680 - DNA, 44 bp, Artificial sequence
  artificial DNA molecule for generation of DNA nanostructure
tttacctacattttgacgctcaaacagagatagaacccttcttt

SEQ ID NO: 3681 - DNA, 44 bp, Artificial sequence
  artificial DNA molecule for generation of DNA nanostructure
ttttgacctgaaagcgtaagaatgagagccagcagcaaatgttt

SEQ ID NO: 3682 - DNA, 43 bp, Artificial sequence
  artificial DNA molecule for generation of DNA nanostructure
ccgcctgcaacagtacctcaagacgacgacagtatcggccttt

SEQ ID NO: 3683 - DNA, 38 bp, Artificial sequence
  artificial DNA molecule for generation of DNA nanostructure
tttggagcggaattatcataaagaaaccaccagaattt

SEQ ID NO: 3684 - DNA, 38 bp, Artificial sequence
  artificial DNA molecule for generation of DNA nanostructure
tttagggttagaacctaccacttctgaataatggattt

SEQ ID NO: 3685 - DNA, 20 bp, Artificial sequence
  artificial DNA molecule for generation of DNA nanostructure
tttcttcgctattactcccg

SEQ ID NO: 3686 - DNA, 28 bp, Artificial sequence
  artificial DNA molecule for generation of DNA nanostructure
tgcatcaaattatagtcagaagcaattt

SEQ ID NO: 3687 - DNA, 28 bp, Artificial sequence
  artificial DNA molecule for generation of DNA nanostructure
tttattaagcaataaagccgcaaagaat

SEQ ID NO: 3688 - DNA, 28 bp, Artificial sequence
  artificial DNA molecule for generation of DNA nanostructure
cgctttcgcagcatcagcggggtcattt

SEQ ID NO: 3689 - DNA, 28 bp, Artificial sequence
  artificial DNA molecule for generation of DNA nanostructure
tttagctgtttcctgtgtgtcgtaatca

SEQ ID NO: 3690 - DNA, 28 bp, Artificial sequence
  artificial DNA molecule for generation of DNA nanostructure
cagcaggcgaagcggtccacgctggttt

SEQ ID NO: 3691 - DNA, 28 bp, Artificial sequence
  artificial DNA molecule for generation of DNA nanostructure
ccgattaaacagagcgggagctaaattt

SEQ ID NO: 3692 - DNA, 28 bp, Artificial sequence
  artificial DNA molecule for generation of DNA nanostructure
tctaaaatattgaaaggaattgaggttt

SEQ ID NO: 3693 - DNA, 28 bp, Artificial sequence
  artificial DNA molecule for generation of DNA nanostructure
attcatttcacaaaatcgcgcagagttt

SEQ ID NO: 3694 - DNA, 33 bp, Artificial sequence
  artificial DNA molecule for generation of DNA nanostructure
tcatcaacattaaatgtgaataattctatgtac

SEQ ID NO: 3695 - DNA, 33 bp, Artificial sequence
  artificial DNA molecule for generation of DNA nanostructure
taaagcatcacctcaacagtctttaggagcact

SEQ ID NO: 3696 - DNA, 34 bp, Artificial sequence
  artificial DNA molecule for generation of DNA nanostructure
acgcaaattaacgaaaaacgctcatggaaatttt

SEQ ID NO: 3697 - DNA, 35 bp, Artificial sequence
  artificial DNA molecule for generation of DNA nanostructure
agagatagactttctccgtggtgagggttcctgta

SEQ ID NO: 3698 - DNA, 48 bp, Artificial sequence
  artificial DNA molecule for generation of DNA nanostructure
aatcatatgtaccccggttgataacattaaagaaatttttaacgcaag

SEQ ID NO: 3699 - DNA, 33 bp, Artificial sequence
  artificial DNA molecule for generation of DNA nanostructure
gagtctggagcaaacaagagaataagattcaaa

SEQ ID NO: 3700 - DNA, 34 bp, Artificial sequence
  artificial DNA molecule for generation of DNA nanostructure
cttcgctattacgccagctggcgaaaagggatag

SEQ ID NO: 3701 - DNA, 40 bp, Artificial sequence
  artificial DNA molecule for generation of DNA nanostructure
tcgatagcgccatcttaaatcaccggaaccagagccacca

SEQ ID NO: 3702 - DNA, 22 bp, Artificial sequence
  artificial DNA molecule for generation of DNA nanostructure
gccagctttcaaccatcgccca

SEQ ID NO: 3703 - DNA, 43 bp, Artificial sequence
  artificial DNA molecule for generation of DNA nanostructure
ttcaacctcaccaacgtcaccgtcaccgacttgagccatttgg

SEQ ID NO: 3704 - DNA, 47 bp, Artificial sequence
  artificial DNA molecule for generation of DNA nanostructure
agcgccaaagacaaaagaacgagtcagaatggtcgaaatccgcgacc

SEQ ID NO: 3705 - DNA, 47 bp, Artificial sequence
  artificial DNA molecule for generation of DNA nanostructure
agaaaattcatatggtttaccaatcagtagcgacagaatcaagtttg

SEQ ID NO: 3706 - DNA, 37 bp, Artificial sequence
  artificial DNA molecule for generation of DNA nanostructure
gccgacaatgacaacatcaacattaaatgtgagcgag

SEQ ID NO: 3707 - DNA, 41 bp, Artificial sequence
  artificial DNA molecule for generation of DNA nanostructure
tgctcattcagtgaataagttccagtggagattttttcgag

SEQ ID NO: 3708 - DNA, 44 bp, Artificial sequence
  artificial DNA molecule for generation of DNA nanostructure
gcttgcccaagtaccttcataggacagatgaacggtgtacagac

SEQ ID NO: 3709 - DNA, 36 bp, Artificial sequence
  artificial DNA molecule for generation of DNA nanostructure
tgacgagtggctgacccagtagcaccattaccatta

SEQ ID NO: 3710 - DNA, 51 bp, Artificial sequence
  artificial DNA molecule for generation of DNA nanostructure
cgcaacgatctggtttagtaccgccaccctcagaagggatcgtcaccctca

SEQ ID NO: 3711 - DNA, 51 bp, Artificial sequence
  artificial DNA molecule for generation of DNA nanostructure
gcgcagacggtcaatcataagggaaccgctaaagactttttcatgaggaag

SEQ ID NO: 3712 - DNA, 19 bp, Artificial sequence
  artificial DNA molecule for generation of DNA nanostructure
ctcaggaaaagttttgtcg

SEQ ID NO: 3713 - DNA, 47 bp, Artificial sequence
  artificial DNA molecule for generation of DNA nanostructure
tttgaggaaactgaccaaattgtgaaagcgcagttttttggggtcga

SEQ ID NO: 3714 - DNA, 42 bp, Artificial sequence
  artificial DNA molecule for generation of DNA nanostructure
taaaggccgcttttgccaaactataaggtaaagtaattctgt

SEQ ID NO: 3715 - DNA, 42 bp, Artificial sequence
  artificial DNA molecule for generation of DNA nanostructure
taaaacgaaagaggcaaaagaatacacgcctgataactttga

SEQ ID NO: 3716 - DNA, 39 bp, Artificial sequence
  artificial DNA molecule for generation of DNA nanostructure
ttagcgtataaccgatatattcggtcgctgagtgtactg

SEQ ID NO: 3717 - DNA, 51 bp, Artificial sequence
  artificial DNA molecule for generation of DNA nanostructure
gggaagcgataccagtgcagcgaaagacagcatcggaacgcgtaacaaagc

SEQ ID NO: 3718 - DNA, 31 bp, Artificial sequence
  artificial DNA molecule for generation of DNA nanostructure
tgtatcatctaaaacaaacggctacagaggc

SEQ ID NO: 3719 - DNA, 47 bp, Artificial sequence
  artificial DNA molecule for generation of DNA nanostructure
ttttgatgatacaggaggcttgcaaccgacaacggccttgtccagaa

SEQ ID NO: 3720 - DNA, 36 bp, Artificial sequence
  artificial DNA molecule for generation of DNA nanostructure
cctcattaaagcagtaaattgggcttgagatggttt

SEQ ID NO: 3721 - DNA, 44 bp, Artificial sequence
  artificial DNA molecule for generation of DNA nanostructure
cataaagctaaatcggttgtaccattttaacggggtcagtgcct

SEQ ID NO: 3722 - DNA, 49 bp, Artificial sequence
  artificial DNA molecule for generation of DNA nanostructure
caataggagtaatactaaaatagacaacaaactgaatggctattagtct

SEQ ID NO: 3723 - DNA, 53 bp, Artificial sequence
  artificial DNA molecule for generation of DNA nanostructure
ttcgcattgtgaattagattgaggcaaaatcacttcatcaagagtaatcttga

SEQ ID NO: 3724 - DNA, 41 bp, Artificial sequence
  artificial DNA molecule for generation of DNA nanostructure
ttcatctcgggcgccactcacattttatcattttgcggaac

SEQ ID NO: 3725 - DNA, 45 bp, Artificial sequence
  artificial DNA molecule for generation of DNA nanostructure
atagcccccttattgtaggtacgatgaacggtaatcgtaaaacta

SEQ ID NO: 3726 - DNA, 33 bp, Artificial sequence
  artificial DNA molecule for generation of DNA nanostructure
acgggaacggctctcacggaaaaagagacgcag

SEQ ID NO: 3727 - DNA, 29 bp, Artificial sequence
  artificial DNA molecule for generation of DNA nanostructure
ataacctcaccggaaacagttacaaaata

SEQ ID NO: 3728 - DNA, 37 bp, Artificial sequence
  artificial DNA molecule for generation of DNA nanostructure
caatcggcttcgcgtctggccggatgtgctgcaaggc

SEQ ID NO: 3729 - DNA, 33 bp, Artificial sequence
  artificial DNA molecule for generation of DNA nanostructure
caatgccttgagctaagggtggtttttcttttc

SEQ ID NO: 3730 - DNA, 37 bp, Artificial sequence
  artificial DNA molecule for generation of DNA nanostructure
ggtgcctaatgaggagtaatgtagcgtttagcaccgt

SEQ ID NO: 3731 - DNA, 41 bp, Artificial sequence
  artificial DNA molecule for generation of DNA nanostructure
cacccagctacaattttatcctgaaaaaaataagaaacgta

SEQ ID NO: 3732 - DNA, 46 bp, Artificial sequence
  artificial DNA molecule for generation of DNA nanostructure
caacgtctgaatcgcagctcataagcaaatgccccaaaaacaggaa

SEQ ID NO: 3733 - DNA, 45 bp, Artificial sequence
  artificial DNA molecule for generation of DNA nanostructure
taaagaactacgtgaaagcgtaagaaccaccagcagaagatatat

SEQ ID NO: 3734 - DNA, 52 bp, Artificial sequence
  artificial DNA molecule for generation of DNA nanostructure
tgagtgttgttccagtttggaacaagagtgcgtattatataaaatttgttat

SEQ ID NO: 3735 - DNA, 39 bp, Artificial sequence
  artificial DNA molecule for generation of DNA nanostructure
taatgcagaacgcgcgtaataagaaaacattatgaccct

SEQ ID NO: 3736 - DNA, 36 bp, Artificial sequence
  artificial DNA molecule for generation of DNA nanostructure
ctgtttattaagtcctgaacaagaaaaataatatcc

SEQ ID NO: 3737 - DNA, 40 bp, Artificial sequence
  artificial DNA molecule for generation of DNA nanostructure
tggcccacgtggactcagcagcaataaagcatcaccttgc

SEQ ID NO: 3738 - DNA, 46 bp, Artificial sequence
  artificial DNA molecule for generation of DNA nanostructure
aagagaatcagggcgatacatggcagaagcctttatttcgttaaat

SEQ ID NO: 3739 - DNA, 42 bp, Artificial sequence
  artificial DNA molecule for generation of DNA nanostructure
gccaacatgtaatttaggcaaatcaagtctctgatttttaga

SEQ ID NO: 3740 - DNA, 23 bp, Artificial sequence
  artificial DNA molecule for generation of DNA nanostructure
gaactccgccaccctcagaaccg

SEQ ID NO: 3741 - DNA, 40 bp, Artificial sequence
  artificial DNA molecule for generation of DNA nanostructure
gtatcatacagcgattcgaaacaaagtacaacaagcgtca

SEQ ID NO: 3742 - DNA, 48 bp, Artificial sequence
  artificial DNA molecule for generation of DNA nanostructure
tgcgttatccagtaataccgaacgaatacgtggcacagactgagagcc

SEQ ID NO: 3743 - DNA, 40 bp, Artificial sequence
  artificial DNA molecule for generation of DNA nanostructure
acaaattcgaatcataattactagaaaaagccttaaaaat

SEQ ID NO: 3744 - DNA, 29 bp, Artificial sequence
  artificial DNA molecule for generation of DNA nanostructure
aaacaccgttaccagtataaagccaacgc

SEQ ID NO: 3745 - DNA, 35 bp, Artificial sequence
  artificial DNA molecule for generation of DNA nanostructure
atagccctaaaacatcgccatgttaatactggtta

SEQ ID NO: 3746 - DNA, 34 bp, Artificial sequence
  artificial DNA molecule for generation of DNA nanostructure
cataaatcaataaaacagccatcacccagaggca

SEQ ID NO: 3747 - DNA, 33 bp, Artificial sequence
  artificial DNA molecule for generation of DNA nanostructure
caccagtcacacgaaaccctcaatcaatatctg

SEQ ID NO: 3748 - DNA, 52 bp, Artificial sequence
  artificial DNA molecule for generation of DNA nanostructure
ttgctttgaataccaagttagagtaacaaattgcgttgcgctcagttaatat

SEQ ID NO: 3749 - DNA, 33 bp, Artificial sequence
  artificial DNA molecule for generation of DNA nanostructure
tattagactttacaaacccagagcctaatttgc

SEQ ID NO: 3750 - DNA, 39 bp, Artificial sequence
  artificial DNA molecule for generation of DNA nanostructure
ctttgccccgggaaacctgtcgtgattgtattttttaac

SEQ ID NO: 3751 - DNA, 36 bp, Artificial sequence
  artificial DNA molecule for generation of DNA nanostructure
gcaaggccggaaatgaaaccagcatgtctttaaatg

SEQ ID NO: 3752 - DNA, 32 bp, Artificial sequence
  artificial DNA molecule for generation of DNA nanostructure
gaattagagccaggagggaaggtaaatattga

SEQ ID NO: 3753 - DNA, 37 bp, Artificial sequence
  artificial DNA molecule for generation of DNA nanostructure
caggcgcataggcaaacaccagggcgacaaccaatca

SEQ ID NO: 3754 - DNA, 44 bp, Artificial sequence
  artificial DNA molecule for generation of DNA nanostructure
caagaaccggatacaaatcaaagggtagcctcatctttgacccc

SEQ ID NO: 3755 - DNA, 35 bp, Artificial sequence
  artificial DNA molecule for generation of DNA nanostructure
cggagagggtagctatttttgagattccaaagaca

SEQ ID NO: 3756 - DNA, 48 bp, Artificial sequence
  artificial DNA molecule for generation of DNA nanostructure
cctttttaagaaaagtaagcagatcaggcgctcttattacaccagaac

SEQ ID NO: 3757 - DNA, 33 bp, Artificial sequence
  artificial DNA molecule for generation of DNA nanostructure
gcccaataataagagcaagaaacgggggtttct

SEQ ID NO: 3758 - DNA, 34 bp, Artificial sequence
  artificial DNA molecule for generation of DNA nanostructure
cctttagcgtcagactgtagcgcgttgatctaca

SEQ ID NO: 3759 - DNA, 40 bp, Artificial sequence
  artificial DNA molecule for generation of DNA nanostructure
tggtgtgttgcactctcaaatggtcaataacctgtttagc

SEQ ID NO: 3760 - DNA, 22 bp, Artificial sequence
  artificial DNA molecule for generation of DNA nanostructure
ccacggaataaattgtgaatta

SEQ ID NO: 3761 - DNA, 43 bp, Artificial sequence
  artificial DNA molecule for generation of DNA nanostructure
caaccagcaacatcataaatccgccgggcgcggttgcggtatg

SEQ ID NO: 3762 - DNA, 47 bp, Artificial sequence
  artificial DNA molecule for generation of DNA nanostructure
caccgtcggtggtgccacctttaatcccaatttgcggaatcgtcata

SEQ ID NO: 3763 - DNA, 47 bp, Artificial sequence
  artificial DNA molecule for generation of DNA nanostructure
ccgcaagaatgccaacggcagtcgttaacggcatcagatgccgggtt

SEQ ID NO: 3764 - DNA, 37 bp, Artificial sequence
  artificial DNA molecule for generation of DNA nanostructure
aatttcaactttaatcgtttattttgtcacaatcaat

SEQ ID NO: 3765 - DNA, 41 bp, Artificial sequence
  artificial DNA molecule for generation of DNA nanostructure
accagaccggaagcaaactcagagcctaaaatgaggccgat

SEQ ID NO: 3766 - DNA, 44 bp, Artificial sequence
  artificial DNA molecule for generation of DNA nanostructure
ccaacaggggttttttcgcgctttaccctgactattatagtcag

SEQ ID NO: 3767 - DNA, 36 bp, Artificial sequence
  artificial DNA molecule for generation of DNA nanostructure
tcaggattgcatcaacggctggtaatgggtaaaggt

SEQ ID NO: 3768 - DNA, 51 bp, Artificial sequence
  artificial DNA molecule for generation of DNA nanostructure
ccttgttactttaaacgggtaaaatacgtaatgcctctacgttaataaaac

SEQ ID NO: 3769 - DNA, 51 bp, Artificial sequence
  artificial DNA molecule for generation of DNA nanostructure
tttaaacagttcagaaaacgagaatgacaataccacattcaactaatgcag

SEQ ID NO: 3770 - DNA, 19 bp, Artificial sequence
  artificial DNA molecule for generation of DNA nanostructure
tttccatagccggaacgag

SEQ ID NO: 3771 - DNA, 47 bp, Artificial sequence
  artificial DNA molecule for generation of DNA nanostructure
gatttaggcataaatctccaatacctgcgaaccgagaaaggaaggga

SEQ ID NO: 3772 - DNA, 42 bp, Artificial sequence
  artificial DNA molecule for generation of DNA nanostructure
acgttgggaagaaaaaagtagggcatcgccatatttaacaac

SEQ ID NO: 3773 - DNA, 42 bp, Artificial sequence
  artificial DNA molecule for generation of DNA nanostructure
ataaccctcgtttaccagacgacgatggatagcgaaaaatca

SEQ ID NO: 3774 - DNA, 39 bp, Artificial sequence
  artificial DNA molecule for generation of DNA nanostructure
tgctccatatgcgattttaagaactggctcacagacgat

SEQ ID NO: 3775 - DNA, 51 bp, Artificial sequence
  artificial DNA molecule for generation of DNA nanostructure
gtcttttgagaagagggaactaacggaacaacattattaccttcaaagcga

SEQ ID NO: 3776 - DNA, 31 bp, Artificial sequence
  artificial DNA molecule for generation of DNA nanostructure
tttagactaaaaaccaagattcatcagttga

SEQ ID NO: 3777 - DNA, 47 bp, Artificial sequence
  artificial DNA molecule for generation of DNA nanostructure
ggaggttgaggcaggtttataccagtatgagattaatcgctaagaat

SEQ ID NO: 3778 - DNA, 36 bp, Artificial sequence
  artificial DNA molecule for generation of DNA nanostructure
ataacagttgatttgctccttttgataagaggtcat

SEQ ID NO: 3779 - DNA, 44 bp, Artificial sequence
  artificial DNA molecule for generation of DNA nanostructure
ccggaaccgcctccctcagagccgatattcacaaacaaataaat

SEQ ID NO: 3780 - DNA, 49 bp, Artificial sequence
  artificial DNA molecule for generation of DNA nanostructure
aatacatacaccctcatcccttataaccctaattttaatggaaacagta

SEQ ID NO: 3781 - DNA, 53 bp, Artificial sequence
  artificial DNA molecule for generation of DNA nanostructure
taagactcttcgcactcttacggcttgccctgaaagattaagaggaagcccga

SEQ ID NO: 3782 - DNA, 41 bp, Artificial sequence
  artificial DNA molecule for generation of DNA nanostructure
gtggtgctgaatcattgaattcgttgtttggattatacttc

SEQ ID NO: 3783 - DNA, 45 bp, Artificial sequence
  artificial DNA molecule for generation of DNA nanostructure
cgcagtgtcactggtcataccaatgaaatagcaatagctatctta

SEQ ID NO: 3784 - DNA, 33 bp, Artificial sequence
  artificial DNA molecule for generation of DNA nanostructure
agggtgagaaaaggctatcaggtcattgcctga

SEQ ID NO: 3785 - DNA, 29 bp, Artificial sequence
  artificial DNA molecule for generation of DNA nanostructure
aggccggagacagtcagtgtaaagcctgg

SEQ ID NO: 3786 - DNA, 37 bp, Artificial sequence
  artificial DNA molecule for generation of DNA nanostructure
aatcaccatataaaagaaacgatcggcattttcggtc

SEQ ID NO: 3787 - DNA, 33 bp, Artificial sequence
  artificial DNA molecule for generation of DNA nanostructure
gcgggccgccgagctcaccgcgcccaatagcaa

SEQ ID NO: 3788 - DNA, 37 bp, Artificial sequence
  artificial DNA molecule for generation of DNA nanostructure
ggatccccgggtattttcacgcgcgcctgtcagcaaa

SEQ ID NO: 3789 - DNA, 41 bp, Artificial sequence
  artificial DNA molecule for generation of DNA nanostructure
accagtgagacgggcaacagctgattggcaacatcaatatg

SEQ ID NO: 3790 - DNA, 46 bp, Artificial sequence
  artificial DNA molecule for generation of DNA nanostructure
ccgaaatagagttggttagcaaaaacgcaaaaagttaccagaagga

SEQ ID NO: 3791 - DNA, 45 bp, Artificial sequence
  artificial DNA molecule for generation of DNA nanostructure
ctgtttgagacggggattgaaaacttaattaattttccctagtta

SEQ ID NO: 3792 - DNA, 52 bp, Artificial sequence
  artificial DNA molecule for generation of DNA nanostructure
gcaagccgtttttattttcatcggcaggccccataggcgatgatctggcgcc

SEQ ID NO: 3793 - DNA, 39 bp, Artificial sequence
  artificial DNA molecule for generation of DNA nanostructure
ggtgccgtaaagcactggccttgccaccctcagaaccgc

SEQ ID NO: 3794 - DNA, 36 bp, Artificial sequence
  artificial DNA molecule for generation of DNA nanostructure
taaatcggaaatcaaaagaatagcccgagatagggt

SEQ ID NO: 3795 - DNA, 40 bp, Artificial sequence
  artificial DNA molecule for generation of DNA nanostructure
tagagctttggtggttcgctgagatacagtaacagtacct

SEQ ID NO: 3796 - DNA, 46 bp, Artificial sequence
  artificial DNA molecule for generation of DNA nanostructure
ttttagacccccgattcattgacaaccctcagagccgccgcagtat

SEQ ID NO: 3797 - DNA, 42 bp, Artificial sequence
  artificial DNA molecule for generation of DNA nanostructure
tagaatcagagcgggagcgaacgtgggagtagatcattagat

SEQ ID NO: 3798 - DNA, 23 bp, Artificial sequence
  artificial DNA molecule for generation of DNA nanostructure
tcaacactacgaaggcaccaacc

SEQ ID NO: 3799 - DNA, 40 bp, Artificial sequence
  artificial DNA molecule for generation of DNA nanostructure
ctgagaagtttgcaaaccagagggggtaataggccgccag

SEQ ID NO: 3800 - DNA, 48 bp, Artificial sequence
  artificial DNA molecule for generation of DNA nanostructure
tgtttttataaagggacgtcgctaatacaatttcatttgacaagaaaa

SEQ ID NO: 3801 - DNA, 40 bp, Artificial sequence
  artificial DNA molecule for generation of DNA nanostructure
taatcagtaataccgaccgtgtgataaataagctgtaaat

SEQ ID NO: 3802 - DNA, 29 bp, Artificial sequence
  artificial DNA molecule for generation of DNA nanostructure
tggtttgagaggccaccgagtaaaagagt

SEQ ID NO: 3803 - DNA, 35 bp, Artificial sequence
  artificial DNA molecule for generation of DNA nanostructure
gtgagtgaataaccttgcttgcgttaaacagaatc

SEQ ID NO: 3804 - DNA, 34 bp, Artificial sequence
  artificial DNA molecule for generation of DNA nanostructure
aatatatttttagaatccaagccggctaaacagg

SEQ ID NO: 3805 - DNA, 33 bp, Artificial sequence
  artificial DNA molecule for generation of DNA nanostructure
ctgagcaaaagaagcaataacggattcgcctga

SEQ ID NO: 3806 - DNA, 52 bp, Artificial sequence
  artificial DNA molecule for generation of DNA nanostructure
attgcgtagattttcaggttatcctgataatcatggtcatagctcaaaagaa

SEQ ID NO: 3807 - DNA, 33 bp, Artificial sequence
  artificial DNA molecule for generation of DNA nanostructure
aaagaaaccaccagaaggagccggaagcataaa

SEQ ID NO: 3808 - DNA, 39 bp, Artificial sequence
  artificial DNA molecule for generation of DNA nanostructure
tgattatctgttatccgctcacaaaccgaggacgtagaa

SEQ ID NO: 3809 - DNA, 36 bp, Artificial sequence
  artificial DNA molecule for generation of DNA nanostructure
ttctttgctcgtcccttacacccgaagcagaatgcg

SEQ ID NO: 3810 - DNA, 32 bp, Artificial sequence
  artificial DNA molecule for generation of DNA nanostructure
agccgggtcactgtggaggtgtccagcatcag

SEQ ID NO: 3811 - DNA, 37 bp, Artificial sequence
  artificial DNA molecule for generation of DNA nanostructure
aagcaaagcggattagagagtatcccacgacatttcg

SEQ ID NO: 3812 - DNA, 44 bp, Artificial sequence
  artificial DNA molecule for generation of DNA nanostructure
aagacttcaaataaattcgagaggtagaaaaatagcgagaggct

SEQ ID NO: 3813 - DNA, 35 bp, Artificial sequence
  artificial DNA molecule for generation of DNA nanostructure
tcagagggtaattgagcgctaatacctttgtagaa

SEQ ID NO: 3814 - DNA, 48 bp, Artificial sequence
  artificial DNA molecule for generation of DNA nanostructure
tgtgtacatcgacataaaaaaatctgcatctgtccgttttataaatca

SEQ ID NO: 3815 - DNA, 33 bp, Artificial sequence
  artificial DNA molecule for generation of DNA nanostructure
aaacagcggatcaaacttaaatttggagccgcc

SEQ ID NO: 3816 - DNA, 34 bp, Artificial sequence
  artificial DNA molecule for generation of DNA nanostructure
acctgcagccagcggtgccggtgccctcagagag

SEQ ID NO: 3817 - DNA, 40 bp, Artificial sequence
  artificial DNA molecule for generation of DNA nanostructure
tcaggctgggttttccaaattaagcaataaagcctcagag

SEQ ID NO: 3818 - DNA, 22 bp, Artificial sequence
  artificial DNA molecule for generation of DNA nanostructure
cgtcagcgtgggagcttaattg

SEQ ID NO: 3819 - DNA, 43 bp, Artificial sequence
  artificial DNA molecule for generation of DNA nanostructure
gtaatggagggccaaaagcggacgacgacagtatcggcctcag

SEQ ID NO: 3820 - DNA, 47 bp, Artificial sequence
  artificial DNA molecule for generation of DNA nanostructure
gtgggaacaaacggcgaatttcttcccgtataagacagccctcatag

SEQ ID NO: 3821 - DNA, 47 bp, Artificial sequence
  artificial DNA molecule for generation of DNA nanostructure
taacaacccgtcggattctccttgggaagggcgatcggtgcgggcct

SEQ ID NO: 3822 - DNA, 37 bp, Artificial sequence
  artificial DNA molecule for generation of DNA nanostructure
ttttgcggatggcttatgctggtctggtcagcagcaa

SEQ ID NO: 3823 - DNA, 41 bp, Artificial sequence
  artificial DNA molecule for generation of DNA nanostructure
gagcctttaattgtatcggtcggaacagtacaagctacagg

SEQ ID NO: 3824 - DNA, 44 bp, Artificial sequence
  artificial DNA molecule for generation of DNA nanostructure
tttatcagtaactccaaaatacaactttcaacagtttcagcgga

SEQ ID NO: 3825 - DNA, 36 bp, Artificial sequence
  artificial DNA molecule for generation of DNA nanostructure
cttgcttggaacaactttccggcaccgcttctggtg

SEQ ID NO: 3826 - DNA, 51 bp, Artificial sequence
  artificial DNA molecule for generation of DNA nanostructure
ctgattgaatcacgccaaaaggaattacgaggcatgattaggattagcggg

SEQ ID NO: 3827 - DNA, 51 bp, Artificial sequence
  artificial DNA molecule for generation of DNA nanostructure
tctttccagacgttagtaaatgaattttcccggaataggtgtatcaccgta

SEQ ID NO: 3828 - DNA, 19 bp, Artificial sequence
  artificial DNA molecule for generation of DNA nanostructure
atacatacccctcaaatgc

SEQ ID NO: 3829 - DNA, 47 bp, Artificial sequence
  artificial DNA molecule for generation of DNA nanostructure
aagtatagctgtatggcattccacaacagttaaacaacatgttcagc

SEQ ID NO: 3830 - DNA, 42 bp, Artificial sequence
  artificial DNA molecule for generation of DNA nanostructure
gactcctcaagagaagcatcacgcataacgtgctttcctcgt

SEQ ID NO: 3831 - DNA, 42 bp, Artificial sequence
  artificial DNA molecule for generation of DNA nanostructure
ccaccctcagagccaccaccctcattgcctgtaggattttgc

SEQ ID NO: 3832 - DNA, 39 bp, Artificial sequence
  artificial DNA molecule for generation of DNA nanostructure
aatattcaatataatgctgtagctcaacatggcaactaa

SEQ ID NO: 3833 - DNA, 51 bp, Artificial sequence
  artificial DNA molecule for generation of DNA nanostructure
ggcgtaacgtacctgagttttgctcagtaccaggcggataggctccaaaag

SEQ ID NO: 3834 - DNA, 31 bp, Artificial sequence
  artificial DNA molecule for generation of DNA nanostructure
actacaacttcagggacgagagggttgatat

SEQ ID NO: 3835 - DNA, 47 bp, Artificial sequence
  artificial DNA molecule for generation of DNA nanostructure
tgaaagtattaaatatttttaagagagcacgtaaattaacaatttaa

SEQ ID NO: 3836 - DNA, 36 bp, Artificial sequence
  artificial DNA molecule for generation of DNA nanostructure
tgagtaacagtgaaacagcttgataccgatagttgc

SEQ ID NO: 3837 - DNA, 44 bp, Artificial sequence
  artificial DNA molecule for generation of DNA nanostructure
tatattttcatttggggcgcgagcgtctggaagtttcattccat

SEQ ID NO: 3838 - DNA, 49 bp, Artificial sequence
  artificial DNA molecule for generation of DNA nanostructure
cggccagaattctactgggtattaagggcgctgcgagaaaactttttca

SEQ ID NO: 3839 - DNA, 53 bp, Artificial sequence
  artificial DNA molecule for generation of DNA nanostructure
aaacgcggccagtttggataggtccagccagctaaaggaattgcgaataataa

SEQ ID NO: 3840 - DNA, 41 bp, Artificial sequence
  artificial DNA molecule for generation of DNA nanostructure
cagtcacgtaaatcaaaatccaaaatttgaggatttagaag

SEQ ID NO: 3841 - DNA, 45 bp, Artificial sequence
  artificial DNA molecule for generation of DNA nanostructure
gattaagttgggtttcagaggtctgctcatttgccgccagcagtt

SEQ ID NO: 3842 - DNA, 33 bp, Artificial sequence
  artificial DNA molecule for generation of DNA nanostructure
gccagcacgcataacccacaagaattgagttaa

SEQ ID NO: 3843 - DNA, 29 bp, Artificial sequence
  artificial DNA molecule for generation of DNA nanostructure
gtgcctgttcttcgcgtcctcacagttga

SEQ ID NO: 3844 - DNA, 37 bp, Artificial sequence
  artificial DNA molecule for generation of DNA nanostructure
tccgtaaggaacgtgccggacgcatcagacgatccag

SEQ ID NO: 3845 - DNA, 33 bp, Artificial sequence
  artificial DNA molecule for generation of DNA nanostructure
cggccagttttatcccgattagttgctattttg

SEQ ID NO: 3846 - DNA, 37 bp, Artificial sequence
  artificial DNA molecule for generation of DNA nanostructure
aacagccatattagccaagctaacgccagcgcaactg

SEQ ID NO: 3847 - DNA, 41 bp, Artificial sequence
  artificial DNA molecule for generation of DNA nanostructure
gcaaatcagatatagaaggcttatctcataacgcgcattag

SEQ ID NO: 3848 - DNA, 46 bp, Artificial sequence
  artificial DNA molecule for generation of DNA nanostructure
tatcatttttagcgcgtcgctggatgaaggaaagccgcacaggcgg

SEQ ID NO: 3849 - DNA, 45 bp, Artificial sequence
  artificial DNA molecule for generation of DNA nanostructure
atcggctggcgtaaccgctgatgcacgctcaatcgtctgaaactg

SEQ ID NO: 3850 - DNA, 52 bp, Artificial sequence
  artificial DNA molecule for generation of DNA nanostructure
catcctaatttacgagcatgtagaaacctgaagcctacgccggcccgttttg

SEQ ID NO: 3851 - DNA, 39 bp, Artificial sequence
  artificial DNA molecule for generation of DNA nanostructure
agaaagcgaaaggagagtacggttgaaaaggtggcatca

SEQ ID NO: 3852 - DNA, 36 bp, Artificial sequence
  artificial DNA molecule for generation of DNA nanostructure
cgggcgctaaccaagtaccgcactcatcgagaacaa

SEQ ID NO: 3853 - DNA, 40 bp, Artificial sequence
  artificial DNA molecule for generation of DNA nanostructure
cacgctgctctttcctggttatataaggttatctaaaata

SEQ ID NO: 3854 - DNA, 46 bp, Artificial sequence
  artificial DNA molecule for generation of DNA nanostructure
tatggttggtagcggtctgaaacatagcattaacatccattcgtct

SEQ ID NO: 3855 - DNA, 42 bp, Artificial sequence
  artificial DNA molecule for generation of DNA nanostructure
ccagacgacgacacgcttcgccgataatgcccccaggcaaag

SEQ ID NO: 3856 - DNA, 23 bp, Artificial sequence
  artificial DNA molecule for generation of DNA nanostructure
ctgtcagtaagagcaacactatc

SEQ ID NO: 3857 - DNA, 40 bp, Artificial sequence
  artificial DNA molecule for generation of DNA nanostructure
gcaatactgaacccatactgagtttcgtcaccctattatt

SEQ ID NO: 3858 - DNA, 48 bp, Artificial sequence
  artificial DNA molecule for generation of DNA nanostructure
tctttgatgcgcgtacacattttgaaatccaatcgcaagattaggttg

SEQ ID NO: 3859 - DNA, 40 bp, Artificial sequence
  artificial DNA molecule for generation of DNA nanostructure
tagtaataccgccagccattgcaacaggaaaaaaatacct

SEQ ID NO: 3860 - DNA, 29 bp, Artificial sequence
  artificial DNA molecule for generation of DNA nanostructure
caatattaacatcacttgcctgagtagaa

SEQ ID NO: 3861 - DNA, 35 bp, Artificial sequence
  artificial DNA molecule for generation of DNA nanostructure
atttcatcttctgaccatggacgctctacgttgta

SEQ ID NO: 3862 - DNA, 34 bp, Artificial sequence
  artificial DNA molecule for generation of DNA nanostructure
ttaatgcgcgaatggaataccacaccaatgcgcc

SEQ ID NO: 3863 - DNA, 33 bp, Artificial sequence
  artificial DNA molecule for generation of DNA nanostructure
gtctgagagactacgtaaaacagaaataaagaa

SEQ ID NO: 3864 - DNA, 52 bp, Artificial sequence
  artificial DNA molecule for generation of DNA nanostructure
gtcagttggcaaatcaacaggataatactaagaaacgattttttgctgattg

SEQ ID NO: 3865 - DNA, 33 bp, Artificial sequence
  artificial DNA molecule for generation of DNA nanostructure
tgaataatggaagggtttaaaaacaggggagcc

SEQ ID NO: 3866 - DNA, 39 bp, Artificial sequence
  artificial DNA molecule for generation of DNA nanostructure
cactaacagaaaatagcagccttcctttagtgcagcctc

SEQ ID NO: 3867 - DNA, 36 bp, Artificial sequence
  artificial DNA molecule for generation of DNA nanostructure
ccggaaaccaggcttcgccatgggcggttaaaacga

SEQ ID NO: 3868 - DNA, 32 bp, Artificial sequence
  artificial DNA molecule for generation of DNA nanostructure
gaagatcgcactcacgttggtgtagatgggcg

SEQ ID NO: 3869 - DNA, 37 bp, Artificial sequence
  artificial DNA molecule for generation of DNA nanostructure
gtgagaatagaaatcgaggtggattgaccaattagca

SEQ ID NO: 3870 - DNA, 44 bp, Artificial sequence
  artificial DNA molecule for generation of DNA nanostructure
ttttttcacgttgaaaaaaaaagtgccgttagcaagcccaatag

SEQ ID NO: 3871 - DNA, 40 bp, Artificial sequence
  artificial DNA molecule for generation of DNA nanostructure
agtcccggaatttgtgcagcgccatgtttaccgccaacga

SEQ ID NO: 3872 - DNA, 40 bp, Artificial sequence
  artificial DNA molecule for generation of DNA nanostructure
gctgataaattaatgcatattcaaccgttctaattccaca

SEQ ID NO: 3873 - DNA, 40 bp, Artificial sequence
  artificial DNA molecule for generation of DNA nanostructure
aacaccctgaacaaagacgggagaattaactgtacagaga

SEQ ID NO: 3874 - DNA, 34 bp, Artificial sequence
  artificial DNA molecule for generation of DNA nanostructure
cggaaattatttcagaaaaatttaaattgtaaac

SEQ ID NO: 3875 - DNA, 34 bp, Artificial sequence
  artificial DNA molecule for generation of DNA nanostructure
cggggtcattgagccgaactaataacggaatacc

SEQ ID NO: 3876 - DNA, 34 bp, Artificial sequence
  artificial DNA molecule for generation of DNA nanostructure
catcgtaaccgccgtaaaagtaaagttaaacgat

SEQ ID NO: 3877 - DNA, 32 bp, Artificial sequence
  artificial DNA molecule for generation of DNA nanostructure
acgctagctgcattaaaaagggcgtttgcggg

SEQ ID NO: 3878 - DNA, 24 bp, Artificial sequence
  artificial DNA molecule for generation of DNA nanostructure
gccaacgctttccagtgaacgtta

SEQ ID NO: 3879 - DNA, 32 bp, Artificial sequence
  artificial DNA molecule for generation of DNA nanostructure
accgcctggccctgagcggcaaaagagccacc

SEQ ID NO: 3880 - DNA, 24 bp, Artificial sequence
  artificial DNA molecule for generation of DNA nanostructure
cagcaagctgtgaaatagatgatg

SEQ ID NO: 3881 - DNA, 32 bp, Artificial sequence
  artificial DNA molecule for generation of DNA nanostructure
taagaacgcgaggcgtccaagaacaatagtag

SEQ ID NO: 3882 - DNA, 24 bp, Artificial sequence
  artificial DNA molecule for generation of DNA nanostructure
aacctccctcaaaaatactaatag

SEQ ID NO: 3883 - DNA, 30 bp, Artificial sequence
  artificial DNA molecule for generation of DNA nanostructure
aaaagcgcaatattttcgtctatataaagt

SEQ ID NO: 3884 - DNA, 23 bp, Artificial sequence
  artificial DNA molecule for generation of DNA nanostructure
ggcgaattattcatttcaattac

SEQ ID NO: 3885 - DNA, 30 bp, Artificial sequence
  artificial DNA molecule for generation of DNA nanostructure
acaaacatattaccttagggagcaggaacg

SEQ ID NO: 3886 - DNA, 23 bp, Artificial sequence
  artificial DNA molecule for generation of DNA nanostructure
tagtgaatttatcaaaatcatag

SEQ ID NO: 3887 - DNA, 30 bp, Artificial sequence
  artificial DNA molecule for generation of DNA nanostructure
cctccggccaaagaacggcaagtctttgac

SEQ ID NO: 3888 - DNA, 23 bp, Artificial sequence
  artificial DNA molecule for generation of DNA nanostructure
gtaattatttacattggcagatt

SEQ ID NO: 3889 - DNA, 52 bp, Artificial sequence
  artificial DNA molecule for generation of DNA nanostructure
caactcgtattaaatctgaacctcaaatatcaccagtaattttttaaaaatc

SEQ ID NO: 3890 - DNA, 44 bp, Artificial sequence
  artificial DNA molecule for generation of DNA nanostructure
ctgcccgcgcggggagcgcaaatcatgaaagatttttgtccatc

SEQ ID NO: 3891 - DNA, 43 bp, Artificial sequence
  artificial DNA molecule for generation of DNA nanostructure
acgccatctcttaccagcgtctttaattcgatttttccagctt

SEQ ID NO: 3892 - DNA, 68 bp, Artificial sequence
  artificial DNA molecule for generation of DNA nanostructure
gaatttgtttttttaattttaaaagtttcaaaatcgaggcggtttccactatgataaaaaatttaccg

SEQ ID NO: 3893 - DNA, 54 bp, Artificial sequence
  artificial DNA molecule for generation of DNA nanostructure
attatcatcatattcctttacatcgggagaaaatgatgaatttttttcaggagg

SEQ ID NO: 3894 - DNA, 46 bp, Artificial sequence
  artificial DNA molecule for generation of DNA nanostructure
gtttcctgggtccacggatgaataagagtcaattttttttttgccc

SEQ ID NO: 3895 - DNA, 45 bp, Artificial sequence
  artificial DNA molecule for generation of DNA nanostructure
cataaaggtgcccttccaacatacgagcggatttttttttgcagg

SEQ ID NO: 3896 - DNA, 70 bp, Artificial sequence
  artificial DNA molecule for generation of DNA nanostructure
tggtcattttttttgcaattcatcaatatataacgtcactggtttgcgaaaatccacttgacttagtcac

SEQ ID NO: 3897 - DNA, 50 bp, Artificial sequence
  artificial DNA molecule for generation of DNA nanostructure
accatatcaaaaggagtctttattatttgcacctttttaatttgcgaatt

SEQ ID NO: 3898 - DNA, 42 bp, Artificial sequence
  artificial DNA molecule for generation of DNA nanostructure
gtttaacggacttgcgaattgaggaactatattttaaggtta

SEQ ID NO: 3899 - DNA, 41 bp, Artificial sequence
  artificial DNA molecule for generation of DNA nanostructure
gcacatcccggtattcgaataacaagaaccttttagcggat

SEQ ID NO: 3900 - DNA, 66 bp, Artificial sequence
  artificial DNA molecule for generation of DNA nanostructure
tagcaaatttattagagccgtcaatattgaaaggggaggtttaatcaatatacaggcatgcctatt

SEQ ID NO: 3901 - DNA, 44 bp, Artificial sequence
  artificial DNA molecule for generation of DNA nanostructure
gaaaaggtttaaaacattatgaccctgtaatacttttgcgggtt

SEQ ID NO: 3902 - DNA, 56 bp, Artificial sequence
  artificial DNA molecule for generation of DNA nanostructure
ttattgttttttgaatttttagagagttagcttcaaagcgaaccttttgtaccatt

SEQ ID NO: 3903 - DNA, 48 bp, Artificial sequence
  artificial DNA molecule for generation of DNA nanostructure
ttcgcctccctcagagccgccacccttttagccgaattaataaatctt

SEQ ID NO: 3904 - DNA, 67 bp, Artificial sequence
  artificial DNA molecule for generation of DNA nanostructure
ttggaattttaagtttattaagaaacgttccagaaggaaaccgagttaccggaacttagagccagtt

SEQ ID NO: 3905 - DNA, 44 bp, Artificial sequence
  artificial DNA molecule for generation of DNA nanostructure
ttaaatcaccggaaccagagccaccttgaaacgcaataataatt

SEQ ID NO: 3906 - DNA, 46 bp, Artificial sequence
  artificial DNA molecule for generation of DNA nanostructure
ttttagcaagttcccttattagcgtttgccatcttttcataatctt

SEQ ID NO: 3907 - DNA, 56 bp, Artificial sequence
  artificial DNA molecule for generation of DNA nanostructure
ttttttttttttcacattgaaaatacttctggcatgattaagactttcatagcctt

SEQ ID NO: 3908 - DNA, 48 bp, Artificial sequence
  artificial DNA molecule for generation of DNA nanostructure
ttaccttgctgaacctcaaatatcaatttttagacattttgaggattt

SEQ ID NO: 3909 - DNA, 67 bp, Artificial sequence
  artificial DNA molecule for generation of DNA nanostructure
ttagcagttctggtaatttgaagaactttacgccagaatcctgagttaaagcatcttatagaacctt

SEQ ID NO: 3910 - DNA, 44 bp, Artificial sequence
  artificial DNA molecule for generation of DNA nanostructure
ttagccagcagcaaatgaaaaatctttaagtgtttttataattt

SEQ ID NO: 3911 - DNA, 46 bp, Artificial sequence
  artificial DNA molecule for generation of DNA nanostructure
ttgtggcacatttattaacaccgcctgcaacagtgccacgctgatt

SEQ ID NO: 3912 - DNA, 56 bp, Artificial sequence
  artificial DNA molecule for generation of DNA nanostructure
ttatcctttttgaacatttttgattattaaaagagtctgtccatttgcggtcagtt

SEQ ID NO: 3913 - DNA, 48 bp, Artificial sequence
  artificial DNA molecule for generation of DNA nanostructure
ttttttagaaccctcatatattttaattagcggattttgctatttttt

SEQ ID NO: 3914 - DNA, 67 bp, Artificial sequence
  artificial DNA molecule for generation of DNA nanostructure
ttcaccattagagcttattagaggtcattaagattaagaggaagcttataaaaatttctgtttagtt

SEQ ID NO: 3915 - DNA, 44 bp, Artificial sequence
  artificial DNA molecule for generation of DNA nanostructure
ttgaagcctttatttcaacgcaaggttccgaaagacttcaaatt

SEQ ID NO: 3916 - DNA, 42 bp, Artificial sequence
  artificial DNA molecule for generation of DNA nanostructure
ttatcgcgttttaattcgtttacctttatttttttgctcctt

SEQ ID NO: 3917 - DNA, 52 bp, Artificial sequence
  artificial DNA molecule for generation of DNA nanostructure
tttttgggaatattcacaaacattcaaagttattcaaagacagaagcgcatt

SEQ ID NO: 3918 - DNA, 42 bp, Artificial sequence
  artificial DNA molecule for generation of DNA nanostructure
ttggaatacccaaaagaattatacataatttttggtggcatt

SEQ ID NO: 3919 - DNA, 52 bp, Artificial sequence
  artificial DNA molecule for generation of DNA nanostructure
ttgccaacaatagataatacatttggaacggtttcaaactatgagcgggctt

SEQ ID NO: 3920 - DNA, 42 bp, Artificial sequence
  artificial DNA molecule for generation of DNA nanostructure
ttagtgaggccaccgagtttgtaataacttttttcacttgtt

SEQ ID NO: 3921 - DNA, 52 bp, Artificial sequence
  artificial DNA molecule for generation of DNA nanostructure
ttggtcaatgccggagagggtattgcatcaaatttttttgcgagaagttttt

SEQ ID NO: 3922 - DNA, 58 bp, Artificial sequence
  artificial DNA molecule for generation of DNA nanostructure
ttgagatggtttaatttcttggtcaggattataatgcttttagtttgaccattagatt

SEQ ID NO: 3923 - DNA, 52 bp, Artificial sequence
  artificial DNA molecule for generation of DNA nanostructure
ttcgcgaggctttttttttagcttcgcgcccaatagcaagttacatataatt

SEQ ID NO: 3924 - DNA, 58 bp, Artificial sequence
  artificial DNA molecule for generation of DNA nanostructure
ttcaaatcagatatagaattcaaacgtattatcaatagttgtgaattatcaccgtctt

SEQ ID NO: 3925 - DNA, 52 bp, Artificial sequence
  artificial DNA molecule for generation of DNA nanostructure
tttagcccgatttttatagggtttatcctgtttgatggtgttcctgagtatt

SEQ ID NO: 3926 - DNA, 58 bp, Artificial sequence
  artificial DNA molecule for generation of DNA nanostructure
ttgttccgaaatcggcaattaatacttcttatattaccttcacacgaccagtaatatt

SEQ ID NO: 3927 - DNA, 52 bp, Artificial sequence
  artificial DNA molecule for generation of DNA nanostructure
ttcttatgcgtttttttttaagttgtagtaaattgggcttttttttgatatt

SEQ ID NO: 3928 - DNA, 55 bp, Artificial sequence
  artificial DNA molecule for generation of DNA nanostructure
tttttaacgtcaaaatacttgaacctcccgacttgcttgttcttcgcgtccgttt

SEQ ID NO: 3929 - DNA, 55 bp, Artificial sequence
  artificial DNA molecule for generation of DNA nanostructure
ttagcttgacggggaaaatttgagtgttgttccagtttgcccgctttccagtctt

SEQ ID NO: 3930 - DNA, 55 bp, Artificial sequence
  artificial DNA molecule for generation of DNA nanostructure
tttaaccctcgtttacgattaactggctcattatacttacatcccttacactgtt

SEQ ID NO: 3931 - DNA, 58 bp, Artificial sequence
  artificial DNA molecule for generation of DNA nanostructure
tttggtttctgccagcacgcgtgcctttgggaggtttttaaacagtttcctttacatt

SEQ ID NO: 3932 - DNA, 58 bp, Artificial sequence
  artificial DNA molecule for generation of DNA nanostructure
tttacattaattgcgttgcgctcactttttggaacattcatattcctttggcgagatt

SEQ ID NO: 3933 - DNA, 58 bp, Artificial sequence
  artificial DNA molecule for generation of DNA nanostructure
tttaaaggtttctttgctcgtcataattcagtcaggttaagattgtttaaaaccaatt

SEQ ID NO: 3934 - DNA, 38 bp, Artificial sequence
  artificial DNA molecule for generation of DNA nanostructure
ttcggccagattgcgcctgtgcactctgatcagatgtt

SEQ ID NO: 3935 - DNA, 38 bp, Artificial sequence
  artificial DNA molecule for generation of DNA nanostructure
ttaaagtgtattacacaacatacgagcccgggtacctt

SEQ ID NO: 3936 - DNA, 38 bp, Artificial sequence
  artificial DNA molecule for generation of DNA nanostructure
tttatgagcctttcaatccgccgggcgctaatgaattt

SEQ ID NO: 3937 - DNA, 52 bp, Artificial sequence
  artificial DNA molecule for generation of DNA nanostructure
ttccccctttccgggttttttaccataagcaaatattaggttaaaacaggtt

SEQ ID NO: 3938 - DNA, 75 bp, Artificial sequence
  artificial DNA molecule for generation of DNA nanostructure
ttatcaacgtaacaaagcttcgcagtgttttatttttgtttatttttgttaaaattactttgaattcaagagttt

SEQ ID NO: 3939 - DNA, 49 bp, Artificial sequence
  artificial DNA molecule for generation of DNA nanostructure
ttttaggattagcggcgcagacggtcattagtaacagttcgcataggtt

SEQ ID NO: 3940 - DNA, 52 bp, Artificial sequence
  artificial DNA molecule for generation of DNA nanostructure
ttgtttccttgagcttttttgaattaatgccccctgcaggtttgcccgtatt

SEQ ID NO: 3941 - DNA, 75 bp, Artificial sequence
  artificial DNA molecule for generation of DNA nanostructure
ttaaccaagtaccgcactttccgctcactttgaggctgttattcttgaaacatgaaagtcctgattaatcggctt

SEQ ID NO: 3942 - DNA, 49 bp, Artificial sequence
  artificial DNA molecule for generation of DNA nanostructure
ttctaccatatcaagctaatgcagaacttggagcggattcgagcatgtt

SEQ ID NO: 3943 - DNA, 52 bp, Artificial sequence
  artificial DNA molecule for generation of DNA nanostructure
tttattggttcggcctttttacgctgattatcagatgttattattatcattt

SEQ ID NO: 3944 - DNA, 76 bp, Artificial sequence
  artificial DNA molecule for generation of DNA nanostructure
tttcaccgcctggccctgtttcttttcatttcttctgatttaattcctgattgtttggtggtgcttgcaggcgctt

SEQ ID NO: 3945 - DNA, 49 bp, Artificial sequence
  artificial DNA molecule for generation of DNA nanostructure
ttaaccaataggaacagcagcaaccgcttaagccccatttgtccagctt

SEQ ID NO: 3946 - DNA, 46 bp, Artificial sequence
  artificial DNA molecule for generation of DNA nanostructure
ttgaaccagacgacgatatttgcagccagcggtttttgccggtgtt

SEQ ID NO: 3947 - DNA, 40 bp, Artificial sequence
  artificial DNA molecule for generation of DNA nanostructure
ttgcatcagacgatccagtttgctcattttagctttcatt

SEQ ID NO: 3948 - DNA, 56 bp, Artificial sequence
  artificial DNA molecule for generation of DNA nanostructure
ttcacgacaagaaccggatatgtcagtgtccttgttatcataagttgatgaacgtt

SEQ ID NO: 3949 - DNA, 46 bp, Artificial sequence
  artificial DNA molecule for generation of DNA nanostructure
ttcatatgaaaatagcagtttcgtaatcatggtttttcatagcttt

SEQ ID NO: 3950 - DNA, 40 bp, Artificial sequence
  artificial DNA molecule for generation of DNA nanostructure
tttgtgtgaaattgttatttcatcgagattgggttgattt

SEQ ID NO: 3951 - DNA, 56 bp, Artificial sequence
  artificial DNA molecule for generation of DNA nanostructure
ttaattccttatcattccaagaaaccactcagaattgcgcctgtttaataatattt

SEQ ID NO: 3952 - DNA, 46 bp, Artificial sequence
  artificial DNA molecule for generation of DNA nanostructure
ttgcgaagccggcgaacgttgcggggagaggctttttgtttgcgtt

SEQ ID NO: 3953 - DNA, 40 bp, Artificial sequence
  artificial DNA molecule for generation of DNA nanostructure
ttgcgccagggtggttttttagagagttttgattttcatt

SEQ ID NO: 3954 - DNA, 48 bp, Artificial sequence
  artificial DNA molecule for generation of DNA nanostructure
ttacgggcaacagtgataattcagaattaagaatgcttgcaaccagtt

SEQ ID NO: 3955 - DNA, 55 bp, Artificial sequence
  artificial DNA molecule for generation of DNA nanostructure
ttgaggggacttgaacaaacttacatgtttttaaggcttgccctgacgagaaatt

SEQ ID NO: 3956 - DNA, 50 bp, Artificial sequence
  artificial DNA molecule for generation of DNA nanostructure
ttcagtgaattttaaatatgcaactaaattagttgatttttatcggcctt

SEQ ID NO: 3957 - DNA, 50 bp, Artificial sequence
  artificial DNA molecule for generation of DNA nanostructure
ttcactacgattttacccaattagtaagcgtcattacatttgaatttttt

SEQ ID NO: 3958 - DNA, 66 bp, Artificial sequence
  artificial DNA molecule for generation of DNA nanostructure
tttggcttttttttaaacggttacctaaaacgaaaggaacgaggggttgagtgtactggtaatatt

SEQ ID NO: 3959 - DNA, 55 bp, Artificial sequence
  artificial DNA molecule for generation of DNA nanostructure
ttaataggaattgtaccgcctttatggtttttgccgtttttattttcatcgtatt

SEQ ID NO: 3960 - DNA, 50 bp, Artificial sequence
  artificial DNA molecule for generation of DNA nanostructure
ttacaagcaattaccagcgccaaagacattaggtaaatttccgtaacatt

SEQ ID NO: 3961 - DNA, 50 bp, Artificial sequence
  artificial DNA molecule for generation of DNA nanostructure
ttgcgttatattgggtattattctttgcccgaactgttttaactcgtttt

SEQ ID NO: 3962 - DNA, 66 bp, Artificial sequence
  artificial DNA molecule for generation of DNA nanostructure
ttattaatttttgaaaaagctttaccagtataaagcatgttcaaatttaagaacattatcattttt

SEQ ID NO: 3963 - DNA, 55 bp, Artificial sequence
  artificial DNA molecule for generation of DNA nanostructure
ttacctgagcttgagaaacattttgcaacattcggtccacgctggtttgcccctt

SEQ ID NO: 3964 - DNA, 50 bp, Artificial sequence
  artificial DNA molecule for generation of DNA nanostructure
ttgcagcaagttggaaaaacgctcatggttaatggattttatgatgaatt

SEQ ID NO: 3965 - DNA, 50 bp, Artificial sequence
  artificial DNA molecule for generation of DNA nanostructure
ttaaaaaagcttattgccctttaaacaagagaattcgattctgagatgtt

SEQ ID NO: 3966 - DNA, 66 bp, Artificial sequence
  artificial DNA molecule for generation of DNA nanostructure
tttgaacggtttacatcgacttcggcctttagtgaggtctggtcgcttaatgcatgtcaatcattt

SEQ ID NO: 3967 - DNA, 48 bp, Artificial sequence
  artificial DNA molecule for generation of DNA nanostructure
ttgtagctcattggcggattgatttttcgtaatgggttgatggctttt

SEQ ID NO: 3968 - DNA, 60 bp, Artificial sequence
  artificial DNA molecule for generation of DNA nanostructure
ttcaggcaagtttttcattccatataacttgtacggtgttaacaaccctttcaacatttt

SEQ ID NO: 3969 - DNA, 58 bp, Artificial sequence
  artificial DNA molecule for generation of DNA nanostructure
ttccgatatattcggtcgttaattgcgattagtttccattgatgatacaggagagatt

SEQ ID NO: 3970 - DNA, 56 bp, Artificial sequence
  artificial DNA molecule for generation of DNA nanostructure
ttaaaacaggttcagaaccgttagtaccaggtttttggataagtgccgtcgagatt

SEQ ID NO: 3971 - DNA, 48 bp, Artificial sequence
  artificial DNA molecule for generation of DNA nanostructure
ttaaaattcattaccctcagaatttttcgccaccctttccacggaatt

SEQ ID NO: 3972 - DNA, 60 bp, Artificial sequence
  artificial DNA molecule for generation of DNA nanostructure
ttagcgacagttccgattgagggagggattaaagggcgttgtatcaccttataagtattt

SEQ ID NO: 3973 - DNA, 58 bp, Artificial sequence
  artificial DNA molecule for generation of DNA nanostructure
tttctgacctaaatttaattagagtcaattaattactatttaaaagtttgagtgaatt

SEQ ID NO: 3974 - DNA, 56 bp, Artificial sequence
  artificial DNA molecule for generation of DNA nanostructure
ttagcgaaagttctttgaatttcgtaaaacatttttaaataaagaaattgcgtatt

SEQ ID NO: 3975 - DNA, 48 bp, Artificial sequence
  artificial DNA molecule for generation of DNA nanostructure
ttgccagccattataacggatttttttgcctgattgttcggccttgtt

SEQ ID NO: 3976 - DNA, 60 bp, Artificial sequence
  artificial DNA molecule for generation of DNA nanostructure
ttcctaaaacttacgctcaatcgtctgattaaatacctttcagtaacattggtttaactt

SEQ ID NO: 3977 - DNA, 58 bp, Artificial sequence
  artificial DNA molecule for generation of DNA nanostructure
ttatagctctcacggaaattttttcccattggttgtgtttaatcgtaaaactaagctt

SEQ ID NO: 3978 - DNA, 56 bp, Artificial sequence
  artificial DNA molecule for generation of DNA nanostructure
tttttgcaaattataggtcattataattcgcttttttctggccttcctgtagcctt

SEQ ID NO: 3979 - DNA, 54 bp, Artificial sequence
  artificial DNA molecule for generation of DNA nanostructure
ttctatattttcatttttttggggcgcgagcttttacatttttttcgcaaattt

SEQ ID NO: 3980 - DNA, 56 bp, Artificial sequence
  artificial DNA molecule for generation of DNA nanostructure
ttcaccgcttctggtgccggaaaccattatagtagttttgcgaacgagtagatttt

SEQ ID NO: 3981 - DNA, 49 bp, Artificial sequence
  artificial DNA molecule for generation of DNA nanostructure
ttccgccacgggaacggttctccgtggttgacgacagttcccaattctt

SEQ ID NO: 3982 - DNA, 42 bp, Artificial sequence
  artificial DNA molecule for generation of DNA nanostructure
ttccgcttttttcgtaatgctttgaatagattaccgttcctt

SEQ ID NO: 3983 - DNA, 50 bp, Artificial sequence
  artificial DNA molecule for generation of DNA nanostructure
ttttttgctcttgttgaaaatctccggattataataatttagccagaatt

SEQ ID NO: 3984 - DNA, 54 bp, Artificial sequence
  artificial DNA molecule for generation of DNA nanostructure
ttcaaaatcaccagtttttagcaccattaccattaccgatttttttgagccatt

SEQ ID NO: 3985 - DNA, 56 bp, Artificial sequence
  artificial DNA molecule for generation of DNA nanostructure
ttctgtagcattccacagacagccctttatgaaaccttaaattattcattaaagtt

SEQ ID NO: 3986 - DNA, 49 bp, Artificial sequence
  artificial DNA molecule for generation of DNA nanostructure
ttagcctttaattgtatttgaggtttattcccatgtattattgacggtt

SEQ ID NO: 3987 - DNA, 42 bp, Artificial sequence
  artificial DNA molecule for generation of DNA nanostructure
tttaaataagtttatcatatttttagcttattattaaatctt

SEQ ID NO: 3988 - DNA, 38 bp, Artificial sequence
  artificial DNA molecule for generation of DNA nanostructure
  misc_feature (25)..(25): n is a, c, g, or t
ttgattaagattttgaaaacatagncgagtacaaactt

SEQ ID NO: 3989 - DNA, 50 bp, Artificial sequence
  artificial DNA molecule for generation of DNA nanostructure
tttatttgcattatcataggtctgacattttagtgaatttattagacttt

SEQ ID NO: 3990 - DNA, 54 bp, Artificial sequence
  artificial DNA molecule for generation of DNA nanostructure
ttcttctgacctgatttttagcgtaagaatacttaaaggtttttacattctgtt

SEQ ID NO: 3991 - DNA, 56 bp, Artificial sequence
  artificial DNA molecule for generation of DNA nanostructure
tttaacaatttcatttgaattaccttttggctattatttggcagattcaccagttt

SEQ ID NO: 3992 - DNA, 49 bp, Artificial sequence
  artificial DNA molecule for generation of DNA nanostructure
ttcggcttaggttgggttttacatcggttaaaagaagttatttacattt

SEQ ID NO: 3993 - DNA, 42 bp, Artificial sequence
  artificial DNA molecule for generation of DNA nanostructure
ttaacttaaattatcccgtatttgattaagtttctggagctt

SEQ ID NO: 3994 - DNA, 50 bp, Artificial sequence
  artificial DNA molecule for generation of DNA nanostructure
ttcatcaaaattacgacggccagtgggcttgtcacgacttctacaaagtt

SEQ ID NO: 3995 - DNA, 60 bp, Artificial sequence
  artificial DNA molecule for generation of DNA nanostructure
ttggcatcaattctactattggcaaagcttgccagttttttgagagatttttagactttt

SEQ ID NO: 3996 - DNA, 48 bp, Artificial sequence
  artificial DNA molecule for generation of DNA nanostructure
ttgcagaatccaccaccagagccgcctttttcaacattactaaaggtt

SEQ ID NO: 3997 - DNA, 60 bp, Artificial sequence
  artificial DNA molecule for generation of DNA nanostructure
ttgccggaaacgtcaccattcatagttattgcaagcccttacaatgatttttaacaactt

SEQ ID NO: 3998 - DNA, 48 bp, Artificial sequence
  artificial DNA molecule for generation of DNA nanostructure
ttaatggatattgaggaaggttatcttttagaatccttcgctgagatt

SEQ ID NO: 3999 - DNA, 60 bp, Artificial sequence
  artificial DNA molecule for generation of DNA nanostructure
ttgacaatatttttgaatttttttaatgtttttcaattttttttcaattttttatatttt

SEQ ID NO: 4000 - DNA, 48 bp, Artificial sequence
  artificial DNA molecule for generation of DNA nanostructure
ttatcgaataggccggagacagtcaattgaaaggggttcgccagggtt

SEQ ID NO: 4001 - DNA, 38 bp, Artificial sequence
  artificial DNA molecule for generation of DNA nanostructure
ttaaggaacattgtttcagcggagttgaccagccagtt

SEQ ID NO: 4002 - DNA, 40 bp, Artificial sequence
  artificial DNA molecule for generation of DNA nanostructure
tttgaattttttccaccctcttcatcgcccttcaaaagtt

SEQ ID NO: 4003 - DNA, 40 bp, Artificial sequence
  artificial DNA molecule for generation of DNA nanostructure
ttctgtaaatttaccaagttttttagttaatttaaccttt

SEQ ID NO: 4004 - DNA, 38 bp, Artificial sequence
  artificial DNA molecule for generation of DNA nanostructure
ttttgggtaattgatgtgctgcaatggccaaaattatt

SEQ ID NO: 4005 - DNA, 40 bp, Artificial sequence
  artificial DNA molecule for generation of DNA nanostructure
ttgtgcgggcttcgttggtgtttctccgtgttggtggatt

SEQ ID NO: 4006 - DNA, 48 bp, Artificial sequence
  artificial DNA molecule for generation of DNA nanostructure
ttgtcggattttatatacctttatgtttatccagtcccggaatttgtt

SEQ ID NO: 4007 - DNA, 48 bp, Artificial sequence
  artificial DNA molecule for generation of DNA nanostructure
ttgtactcagttcggttttattgcttgattaccgatagttgcgccgtt

SEQ ID NO: 4008 - DNA, 48 bp, Artificial sequence
  artificial DNA molecule for generation of DNA nanostructure
ttgtaccttttttattataattaagacaatagaacgcgagaaaacttt

SEQ ID NO: 4009 - DNA, 50 bp, Artificial sequence
  artificial DNA molecule for generation of DNA nanostructure
ttcaccggaaacaatcggttatcctcatttaatatgtgttcgcattaatt

SEQ ID NO: 4010 - DNA, 50 bp, Artificial sequence
  artificial DNA molecule for generation of DNA nanostructure
tttcagcttgctttcgagttcctgataattagtcccggttagtattaatt

SEQ ID NO: 4011 - DNA, 50 bp, Artificial sequence
  artificial DNA molecule for generation of DNA nanostructure
ttctatatgtaaatgctgtttaccgacattgttcagatttggattatatt

SEQ ID NO: 4012 - DNA, 56 bp, Artificial sequence
  artificial DNA molecule for generation of DNA nanostructure
ttcttacggctggtaaattttttttaaacgttaattttaaatcagctcattttttt

SEQ ID NO: 4013 - DNA, 48 bp, Artificial sequence
  artificial DNA molecule for generation of DNA nanostructure
ttaacggaacttcttccggccagagcacctttgaccttactgaccatt

SEQ ID NO: 4014 - DNA, 56 bp, Artificial sequence
  artificial DNA molecule for generation of DNA nanostructure
ttgtgtacagaccctattttttttggaacctattttagactcctcaagagaaggtt

SEQ ID NO: 4015 - DNA, 48 bp, Artificial sequence
  artificial DNA molecule for generation of DNA nanostructure
ttattgtgtcttatgatttgtatcatcgacaacgccttaatagatatt

SEQ ID NO: 4016 - DNA, 50 bp, Artificial sequence
  artificial DNA molecule for generation of DNA nanostructure
ttacaagaaattttatcaacttaacatgtattgtagggctcatatttatt

SEQ ID NO: 4017 - DNA, 56 bp, Artificial sequence
  artificial DNA molecule for generation of DNA nanostructure
ttcccatcctaatatggcatttttttcatcaatattataatggaagggttagaatt

SEQ ID NO: 4018 - DNA, 48 bp, Artificial sequence
  artificial DNA molecule for generation of DNA nanostructure
ttaaaggtaattttaagagaatataaagccgttccgttgcaccgtctt

SEQ ID NO: 4019 - DNA, 50 bp, Artificial sequence
  artificial DNA molecule for generation of DNA nanostructure
ttcatcccacttcaacggcattgcaaacgctttaaacgatgctgattgtt

SEQ ID NO: 4020 - DNA, 47 bp, Artificial sequence
  artificial DNA molecule for generation of DNA nanostructure
ttttttcgtctcgtcgttttttggcagcttgttgccggacttgtatt

SEQ ID NO: 4021 - DNA, 58 bp, Artificial sequence
  artificial DNA molecule for generation of DNA nanostructure
ttctgaggctttactaaagactttttcattgccgaggcaaaagaatttttataccatt

SEQ ID NO: 4022 - DNA, 47 bp, Artificial sequence
  artificial DNA molecule for generation of DNA nanostructure
ttagcgcgaaacaaagtttttacaacggttgtaaatccgcgaccttt

SEQ ID NO: 4023 - DNA, 58 bp, Artificial sequence
  artificial DNA molecule for generation of DNA nanostructure
tttggtttgatttaagaataaacaccggttcaaccaacgctcaacattatttaggctt

SEQ ID NO: 4024 - DNA, 47 bp, Artificial sequence
  artificial DNA molecule for generation of DNA nanostructure
ttagaggcattttcgatttttccagtaattatgtaattctgtccatt

SEQ ID NO: 4025 - DNA, 58 bp, Artificial sequence
  artificial DNA molecule for generation of DNA nanostructure
ttaagagacgttcatttgccgccagcagttgcttgaagggtaaagtttggtccgtttt

SEQ ID NO: 4026 - DNA, 46 bp, Artificial sequence
  artificial DNA molecule for generation of DNA nanostructure
ttctccatgttacttatttgaaaaaaaaaggctcttacgcataatt

SEQ ID NO: 4027 - DNA, 46 bp, Artificial sequence
  artificial DNA molecule for generation of DNA nanostructure
ttacgacgacaataaattaatgagactacctttttttttcatcttt

SEQ ID NO: 4028 - DNA, 46 bp, Artificial sequence
  artificial DNA molecule for generation of DNA nanostructure
ttaacgtcagcgtggtttttgccaagctttcagattgtgaagggtt

SEQ ID NO: 4029 - DNA, 53 bp, Artificial sequence
  artificial DNA molecule for generation of DNA nanostructure
ttcctttttattaactgaacttttaagcccttcacccagctacaattttatcc

SEQ ID NO: 4030 - DNA, 51 bp, Artificial sequence
  artificial DNA molecule for generation of DNA nanostructure
ttgagaatttttagaataagttgctatcttaccgaagccagagagataacc

SEQ ID NO: 4031 - DNA, 51 bp, Artificial sequence
  artificial DNA molecule for generation of DNA nanostructure
tttccaaattttctaattttttcgctaacgagcgtcttttgaagccttaaa

SEQ ID NO: 4032 - DNA, 53 bp, Artificial sequence
  artificial DNA molecule for generation of DNA nanostructure
tttccagagcttaagaaacgttctattttgttaataataagagcaagaaacaa

SEQ ID NO: 4033 - DNA, 53 bp, Artificial sequence
  artificial DNA molecule for generation of DNA nanostructure
tgaaatagcaatatttaagcagattcagaaccgttggttgaggcaggtcagtt

SEQ ID NO: 4034 - DNA, 53 bp, Artificial sequence
  artificial DNA molecule for generation of DNA nanostructure
cacaagaattgagttaccctgaatttatcccaattagttttaatcgggtcatt

SEQ ID NO: 4035 - DNA, 55 bp, Artificial sequence
  artificial DNA molecule for generation of DNA nanostructure
tcaagattagttgttattttttgttttagacggttataacatattctcattaatt

SEQ ID NO: 4036 - DNA, 53 bp, Artificial sequence
  artificial DNA molecule for generation of DNA nanostructure
tgaatcttaccaattgccagttattataccgggttcttggctgaccttcattt

SEQ ID NO: 4037 - DNA, 53 bp, Artificial sequence
  artificial DNA molecule for generation of DNA nanostructure
ttaacaggagttagtgtagcttggttgcttttcaaagggcgaaaaaccgtcta

SEQ ID NO: 4038 - DNA, 51 bp, Artificial sequence
  artificial DNA molecule for generation of DNA nanostructure
ttgctggctattgccgtattttatcagagcgggagctaatgcgccgctaca

SEQ ID NO: 4039 - DNA, 51 bp, Artificial sequence
  artificial DNA molecule for generation of DNA nanostructure
ttcctaaatgtttcaatgttttccactacgtgaaccatagagtccactatt

SEQ ID NO: 4040 - DNA, 53 bp, Artificial sequence
  artificial DNA molecule for generation of DNA nanostructure
ttcacccaaattggagcccctttccaacgttttgacgagcacgtataacgtgc

SEQ ID NO: 4041 - DNA, 53 bp, Artificial sequence
  artificial DNA molecule for generation of DNA nanostructure
tttcctcgttagattaaagggatttaccctcaattcactaacaactaatagtt

SEQ ID NO: 4042 - DNA, 53 bp, Artificial sequence
  artificial DNA molecule for generation of DNA nanostructure
gggcgcgtactatttggtcacgcttatcggaactttgcggaactaaagaactt

SEQ ID NO: 4043 - DNA, 55 bp, Artificial sequence
  artificial DNA molecule for generation of DNA nanostructure
aaagaacgtggacttcgatttagttgctagggcttgggaagaattttagaagttt

SEQ ID NO: 4044 - DNA, 53 bp, Artificial sequence
  artificial DNA molecule for generation of DNA nanostructure
tcagggcgatggcttttttggggttgctaactctttatgaaaccaatcaattt

SEQ ID NO: 4045 - DNA, 53 bp, Artificial sequence
  artificial DNA molecule for generation of DNA nanostructure
ttctgactattttagtaaaattatgctttattactaacggaacaacattatta

SEQ ID NO: 4046 - DNA, 51 bp, Artificial sequence
  artificial DNA molecule for generation of DNA nanostructure
ttggggtatatttatatgtcttaaatcaggtctttaccataaatattcatt

SEQ ID NO: 4047 - DNA, 51 bp, Artificial sequence
  artificial DNA molecule for generation of DNA nanostructure
ttgcatagttttcacatttctttcatcagttgagatttacgttgggaagaa

SEQ ID NO: 4048 - DNA, 53 bp, Artificial sequence
  artificial DNA molecule for generation of DNA nanostructure
ttaggaatacttaagagcaatttaaaacgattaacagttcagaaaacgagaat

SEQ ID NO: 4049 - DNA, 53 bp, Artificial sequence
  artificial DNA molecule for generation of DNA nanostructure
gaccataaatcaattagaagcaattatgcaatgtttattcaaccgttctagtt

SEQ ID NO: 4050 - DNA, 53 bp, Artificial sequence
  artificial DNA molecule for generation of DNA nanostructure
gaatccccctcaatttgtttagattattacgagttatgtaccctcggtctgtt

SEQ ID NO: 4051 - DNA, 55 bp, Artificial sequence
  artificial DNA molecule for generation of DNA nanostructure
aaatctacgttaattcactatcatttgccagagttgagaggcttttgagagattt

SEQ ID NO: 4052 - DNA, 53 bp, Artificial sequence
  artificial DNA molecule for generation of DNA nanostructure
caggtagaaagatttaactaatgtttaatgggtttattcagcggggtcatttt

SEQ ID NO: 4053 - DNA, 39 bp, Artificial sequence
  artificial DNA molecule for generation of DNA nanostructure
ggtaattgagcttagagccgccaccaaagaattagcatt

SEQ ID NO: 4054 - DNA, 24 bp, Artificial sequence
  artificial DNA molecule for generation of DNA nanostructure
aaactccaacattaactttaatca

SEQ ID NO: 4055 - DNA, 24 bp, Artificial sequence
  artificial DNA molecule for generation of DNA nanostructure
gccatattattttcaaagtcagag

SEQ ID NO: 4056 - DNA, 47 bp, Artificial sequence
  artificial DNA molecule for generation of DNA nanostructure
ttgtgaattactttgtgttcagcaaatcgttaacggctggtgctgtt

SEQ ID NO: 4057 - DNA, 50 bp, Artificial sequence
  artificial DNA molecule for generation of DNA nanostructure
ttaatctttgcttatgcggcgggccgttttcacggtcttcaaaataaaca

SEQ ID NO: 4058 - DNA, 49 bp, Artificial sequence
  artificial DNA molecule for generation of DNA nanostructure
ttagcattaattcctcagagcataaagctaaatcggttagaccggaagc

SEQ ID NO: 4059 - DNA, 39 bp, Artificial sequence
  artificial DNA molecule for generation of DNA nanostructure
accacacccgctttcaacagttgaaacaagtttgccttt

SEQ ID NO: 4060 - DNA, 24 bp, Artificial sequence
  artificial DNA molecule for generation of DNA nanostructure
cagtatgttagttggcttatccgg

SEQ ID NO: 4061 - DNA, 24 bp, Artificial sequence
  artificial DNA molecule for generation of DNA nanostructure
taaagcactaatttgcgcgtaacc

SEQ ID NO: 4062 - DNA, 47 bp, Artificial sequence
  artificial DNA molecule for generation of DNA nanostructure
tattctaagaattagcctcctcacagttgaggatcccggaagcattt

SEQ ID NO: 4063 - DNA, 50 bp, Artificial sequence
  artificial DNA molecule for generation of DNA nanostructure
tttgtctttccttaagcctggggtgcctaatgagtgatttcgaggtgccg

SEQ ID NO: 4064 - DNA, 49 bp, Artificial sequence
  artificial DNA molecule for generation of DNA nanostructure
ttatcgatagttgcgcgttttcatcggcattttcggtttccttattacg

SEQ ID NO: 4065 - DNA, 39 bp, Artificial sequence
  artificial DNA molecule for generation of DNA nanostructure
ccaatactgcgttttcaaaagggtgagccattaaaaatt

SEQ ID NO: 4066 - DNA, 24 bp, Artificial sequence
  artificial DNA molecule for generation of DNA nanostructure
accgttgtagcttaatcccttata

SEQ ID NO: 4067 - DNA, 24 bp, Artificial sequence
  artificial DNA molecule for generation of DNA nanostructure
cgccaaaaggattctggatagcgt

SEQ ID NO: 4068 - DNA, 47 bp, Artificial sequence
  artificial DNA molecule for generation of DNA nanostructure
aatcaaaagaattggaaacctgtcgtgccagctgcatggttgcggtt

SEQ ID NO: 4069 - DNA, 59 bp, Artificial sequence
  artificial DNA molecule for generation of DNA nanostructure
ttccagtgagtttttcgcacttgggtcactgttgccctgcggctggttcagatacataa

SEQ ID NO: 4070 - DNA, 49 bp, Artificial sequence
  artificial DNA molecule for generation of DNA nanostructure
ttgtctttaattagcagaagataaaacagaggtgagttcacgcaaatta

SEQ ID NO: 4071 - DNA, 58 bp, Artificial sequence
  artificial DNA molecule for generation of DNA nanostructure
ttagaggacattggaaccgattcccagcgattacactaaattaacgagggtagcattt

SEQ ID NO: 4072 - DNA, 38 bp, Artificial sequence
  artificial DNA molecule for generation of DNA nanostructure
tttacggctacagagggcgggatcgtcaccctcagttt

SEQ ID NO: 4073 - DNA, 34 bp, Artificial sequence
  artificial DNA molecule for generation of DNA nanostructure
tttcagcgaaagacagcatcggttacactcattt

SEQ ID NO: 4074 - DNA, 66 bp, Artificial sequence
  artificial DNA molecule for generation of DNA nanostructure
gcagtagagtaggtagagattaggcaaaatcatattctttccggtttcaggaagttacagcgcctt

SEQ ID NO: 4075 - DNA, 66 bp, Artificial sequence
  artificial DNA molecule for generation of DNA nanostructure
gcagtagagtaggtagagattaggcataatcagttttacaacgcttctgagtttttcttaaacatt

SEQ ID NO: 4076 - DNA, 66 bp, Artificial sequence
  artificial DNA molecule for generation of DNA nanostructure
gcagtagagtaggtagagattaggcactgatagcttattacattttacaaacatttccaatcgctt

SEQ ID NO: 4077 - DNA, 28 bp, Artificial sequence
  artificial DNA molecule for generation of DNA nanostructure
ttaaattaagcaataaagttcatccaat

SEQ ID NO: 4078 - DNA, 28 bp, Artificial sequence
  artificial DNA molecule for generation of DNA nanostructure
ttttagcgtcagactgtattcagcaccg

SEQ ID NO: 4079 - DNA, 28 bp, Artificial sequence
  artificial DNA molecule for generation of DNA nanostructure
tttaccgaacgaaccacctttgcgcgaa

SEQ ID NO: 4080 - DNA, 56 bp, Artificial sequence
  artificial DNA molecule for generation of DNA nanostructure
tttttttcacttctgtatgggattttgctaaacaacttgccagcattggaaagctt

SEQ ID NO: 4081 - DNA, 56 bp, Artificial sequence
  artificial DNA molecule for generation of DNA nanostructure
ttttatcaaattcgtcgctattaattaattttccctttaaaatatcttacaaactt

SEQ ID NO: 4082 - DNA, 56 bp, Artificial sequence
  artificial DNA molecule for generation of DNA nanostructure
ttgttgtaaattctcttcgctattacgccagctggcttatcaccatgctatcagtt

SEQ ID NO: 4083 - DNA, 72 bp, Artificial sequence
  artificial DNA molecule for generation of DNA nanostructure
gcagtagagtaggtagagattaggcattgtcgtctttccagacgttagtaaattacgattggccttgatttt

SEQ ID NO: 4084 - DNA, 72 bp, Artificial sequence
  artificial DNA molecule for generation of DNA nanostructure
gcagtagagtaggtagagattaggcaatatatgtgagtgaataaccttgcttttattagagccgtcagagtt

SEQ ID NO: 4085 - DNA, 72 bp, Artificial sequence
  artificial DNA molecule for generation of DNA nanostructure
gcagtagagtaggtagagattaggcatgcgcaactgttgggaagggcgatcgttctgataaattaataactt

SEQ ID NO: 4086 - DNA, 54 bp, Artificial sequence
  artificial DNA molecule for generation of DNA nanostructure
ttagagccaccaccctcattttttttcagggatattgcgtaacgatctaaagtt

SEQ ID NO: 4087 - DNA, 54 bp, Artificial sequence
  artificial DNA molecule for generation of DNA nanostructure
ttacaaaatcgcgcagaggtttttgaattattcattgaaacagtacataaatca

SEQ ID NO: 4088 - DNA, 54 bp, Artificial sequence
  artificial DNA molecule for generation of DNA nanostructure
tttagatgggcgcatcgtatttttccgtgcatctttgccattcgccattcaggc

SEQ ID NO: 4089 - DNA, 74 bp, Artificial sequence
  artificial DNA molecule for generation of DNA nanostructure
gcagtagagtaggtagagattaggcagttaaaggcgaaacgtttatcgcactttagtcgagttttctggaagtt

SEQ ID NO: 4090 - DNA, 74 bp, Artificial sequence
  artificial DNA molecule for generation of DNA nanostructure
gcagtagagtaggtagagattaggcaccgtgtgagtgaatttttcgtcaccattaattaggtttacattcaatt

SEQ ID NO: 4091 - DNA, 74 bp, Artificial sequence
  artificial DNA molecule for generation of DNA nanostructure
gcagtagagtaggtagagattaggcagcggatcaatgcaaatttcaagaaaattgatatatattacattttgtt

SEQ ID NO: 4092 - DNA, 40 bp, Artificial sequence
  artificial DNA molecule for generation of DNA nanostructure
ttaggcaccattgtaaaatattctttgaggtttgcaggga

SEQ ID NO: 4093 - DNA, 40 bp, Artificial sequence
  artificial DNA molecule for generation of DNA nanostructure
ttcaaattctttctgtttagttgcgttaaattaataccga

SEQ ID NO: 4094 - DNA, 40 bp, Artificial sequence
  artificial DNA molecule for generation of DNA nanostructure
ttcgcacaggttataaaaaatttttctgctttcagaaaca

SEQ ID NO: 4095 - DNA, 26 bp, Artificial sequence
  5'-end of a group of artificial DNA molecules for generation of DNA nanostructure
gcagtagagtaggtagagattaggca

1. A macromolecule-based nanostructure,
wherein said macromolecule-based nanostructure is a DNA-based nanostructure formed by self-assembling DNA-based building blocks,
wherein said nanostructure is a shell with an opening for accessing said cavity,
wherein each of said self-assembling DNA-based building blocks is formed by a single-stranded DNA template strand and a set of oligonucleotides complementary to said single-stranded DNA template,
wherein each of said oligonucleotides is either complementary to one contiguous DNA sequence stretch or to at least two non-contiguous DNA sequence stretches on said single-stranded DNA template,
wherein each of said self-assembling DNA-based building blocks is a triangular and/or a rectangular prismoid, particularly a triangular prismoid
and wherein between one and ten antibody-based binding sites are attached to the interior site of the cavity formed by said macromolecule-based nanostructure.

2. A macromolecule-based nanostructure having a molecular mass of at least 1 MDa, encasing a cavity with a diameter of at least 20 nm for encapsulating a virus or viral particle, in particular wherein said macromolecule-based nanostructure is a DNA-based nanostructure.

3. The macromolecule-based nanostructure of claim 2, wherein said macromolecule-based nanostructure is a DNA-based nanostructure formed by self-assembling DNA-based building blocks, in particular wherein each of said self-assembling DNA-based building blocks is formed by a single-stranded DNA template strand and a set of oligonucleotides complementary to said single-stranded DNA template, wherein each of said oligonucleotides is either complementary to one contiguous DNA sequence stretch or to at least two non-contiguous DNA sequence stretches on said single-stranded DNA template.

4. The macromolecule-based nanostructure of claim 2 or 3, which is a closed three-dimensional geometric shape, in particular a closed three-dimensional geometric shape selected from a sphere, a spherocylinder, and a polyhedron, in particular a tetrahedron, an octahedron or an icosahedron, formed in situ in the presence of said virus or viral particle to be encapsulated, in particular formed in situ from said self-assembling DNA-based building blocks in the presence of said virus or viral particle to be encapsulated.

5. The macromolecule-based nanostructure of claim 2, which is a shell with an opening for accessing said cavity.

6. The macromolecule-based nanostructure of claim 2, which is a combination of a first and a second shell with an opening to access a first and a second inner cavity, respectively, wherein said first and said second inner cavity together form said cavity, in particular wherein said first and said second shell are connected by at least one linker.

7. The macromolecule-based nanostructure of claim 2, which is based on an icosahedral structure.

8. The macromolecule-based nanostructure of claim 7, wherein said macromolecule-based nanostructure is a DNA-based nanostructure formed by self-assembling DNA-based building blocks, wherein each of said self-assembling DNA-based building blocks is a triangular and/or a rectangular prismoid, particularly a triangular prismoid.

9. The macromolecule-based nanostructure of claim 8,
wherein each said triangular and/or a rectangular prismoid is formed by m triangular, or rectangular, respectively, planes, wherein m is an integer independently selected from 4, 5, 6, 7 and 8, in particular independently selected from 5, 6 and 7, more particularly wherein said integer is 6,
the three, or four, respectively, edges of each of said m planes are formed by n parallel stretches of DNA double helices, wherein n is an integer independently selected from 1, 2, 3, 4, 5 and 6 in particular independently selected from 2, 3, 4 and 5, more particularly independently selected from 3 and 4,
wherein each plane is connected to a plane above and/or a plane beyond said plane (i) by stacking interactions between the DNA double helices forming said planes, and (ii) partially by DNA stretches within said single-stranded DNA template and/or said oligonucleotides forming said DNA-based building block bridging at least two of said planes, and
wherein at least two of the three, or four, respectively, side trapezoids comprises a specific pattern of recesses and/or extrusions formed by missing or additional DNA double helical stretches for specific interaction with a complementary pattern on the side trapezoid of another one of said self-assembling DNA-based building blocks.

10. The macromolecule-based nanostructure of claim 9, wherein for at least part of said self-assembling DNA-based building blocks the length of at least one edge of each of said m planes is decreasing from the first to the m^{th} plane, so that bevel angles results between planes perpendicular to said first plane and each of the trapezoid planes formed by said m edges.

11. The macromolecule-based nanostructure of claim 9 comprising at least one set of self-assembling DNA-based building blocks, wherein all three, or four, respectively, side trapezoids comprises a specific pattern of recesses and/or extrusions formed by missing or additional DNA double helical stretches for specific interaction with a complementary pattern on the side trapezoid of another one of said self-assembling DNA-based building blocks.

12. The macromolecule-based nanostructure of claim 9, wherein the side trapezoids of the self-assembling DNA-based building blocks forming the rim of said shell, or of said first and second shell, respectively, do not comprises a specific pattern of recesses and/or extrusions formed by missing or additional DNA double helical stretches for specific interaction with a complementary pattern on the side trapezoid of another one of said self-assembling DNA-based building blocks.

13. The macromolecule-based nanostructure of claim 1, wherein said macromolecule-based nanostructure is a DNA-based nanostructure, which is a shell selected from
(a) a half octahedron, which consists of a set of four copies of a triangular frustum, wherein the base-pair stacking contacts on one of the triangular edges of the triangular frustum are inactivated by either strand shortening or by adding unpaired thymidines;
(b) a half T=1 shell, which consists of two sets of in each case five copies of two different triangular frusta, wherein the five copies of the first set form a closed pentamer, and the five copies of the second set dock onto the edges of said pentamer; and
(c) a “trap” T=1 shell with a missing pentagon vertex, which consists of three sets of in each case five copies of three different triangular frusta, wherein the five copies of the first set form a closed pentamer, the five copies of the second set dock onto the edges of said pentamer the five copies of the second set dock onto the edges of said pentamer, and the five copies of the third set dock into the gaps between the five copies of said second set.

14. The macromolecule-based nanostructure of claim 8, further comprising
(a) one or more types of DNA brick constructs, each type of such DNA brick constructs being characterized by one or more interaction sites for specific interaction by edge-to-edge stacking contacts with one or more complementary interaction sites present on the plane of a triangular or rectangular frustum on the outer surface of said DNA-based nanostructure, wherein said DNA brick constructs cover the free space between the three, or four, respectively, edges of said plane;
(b) one or more cross-linkages within one of said triangular or rectangular prismoids, and/or between two of said triangular and/or rectangular prismoids; and/or
(c) at least one moiety specifically interacting with said virus or viral particle.

15. A composition comprising a virus or viral particle encapsulated by a macromolecule-based nanostructure according to claim 1.

16. A method for encapsulating a virus or viral particle, comprising the steps of: providing a macromolecule-based nanostructure according to claim 1, and contacting said macromolecule-based nanostructure with a medium comprising, or suspected to comprise, said virus or viral particle.
